United States Patent Application Publication US 2026/0109938 A1 - sequence listing, part 3

SEQ ID NO: 2 - DNA, 3979097 bp, Escherichia coli (residues 1-1,989,549 of 3,979,097)
  source 1..3979097: mol_type = genomic DNA
agcttttcattctgactgcaacgggcaatatgtctctgtgtggattaaaaaaagagtgtctgatagcagcttctgaactggttacctgccgtgagtaaattaaaattttattgacttaggtcactaaatactttaaccaatataggcatagcgcacagacagataaaaattacagagtacacaacatccatgaaacgcattagcaccaccattaccaccaccatcaccattaccacaggtaacggtgcgggctgacgcgtacaggaaacacagaaaaaagcccgcacctgacagtgcgggctttttttttcgaccaaaggtaacgaggtaacaaccatgcgagtgttgaagttcggcggtacaagtgtggcaaatgcagaacgttttctgcgtgttgccgatattctggaaagcaatgccaggcaggggcaggtggccaccgtcctctctgcccccgccaaaatcaccaaccacctggtggcgatgattgaaaaaaccattagcggccaggatgctttacccaatatcagcgatgccgaacgtatttttgccgaacttttgacgggactcgccgccgcccagccggggttcccgctggcgcaattgaaaactttcgtcgatcaggaatttgcccaaataaaacatgtcctgcatggcattagtttgttggggcagtgcccggatagcatcaacgctgcgctgatttgccgtggcgagaaaatgagcatcgccattatggccggcgtattagaagcgcgcggtcacaacgttactgttatcgatccggtcgaaaaactgctggcagtggggcattacctcgaatctaccgtcgatattgctgagtccacccgccgtattgcggcaagccgcattccggctgatcacatggtgctgatggcaggtttcaccgccggtaatgaaaaaggcgaactggtggtgcttggacgcaacggttccgactactctgctgcggtgctggctgcctgtttacgcgccgattgttgcgagatttggacggacgttgacggggtctatacctgcgacccgcgtcaggtgcccgatgcgaggttgttgaagagcatgtcctaccaggaagcgatggagctttcctacttcggcgctaaagttcttcacccccgcaccattacccccatcgcccagttccagatcccttgcctgattaaaaataccggaaatcctcaagcaccaggtacgctcattggtgccagccgtgatgaagacgaattaccggtcaagggcatttccaatctgaataacatggcaatgttcagcgtttctggtccggggatgaaagggatggtcggcatggcggcgcgcgtctttgcagcgatgagtcgcgcccgtatttccgtggtgctgattacgcaaagttcttccgaatacagcatcagtttctgcgttccacaaagcgactgtgtgcgagctgaacgggcaatgcaggaagagttctacctggaactgaaagaaggcttactggagccgctggcagtgacggaacggctggccattatcagcgtggtaggtgatggtatgcgcaccttgcgtgggatcagcgcgaaattctttgccgcactggcccgcgccaatatcaacattgtcgccattgctcagggatcttctgaacgcagtatctctgtcgtggtaaataacgatgatgcgaccactggcgtgcgcgttactcatcagatgctgttcaataccgatcaggttatcgaagtgtttgtgattggcgtcggtggcgttggcggtgcgctgctggagcaactgaagcgtcagcaaagctggctgaagaataaacatatcgacttacgtgtctgcggtgttgccaacagcaaggctctgctcaccaatgtacatggccttaatctggaaaactggcaggaagaactggcgcaagccaaagagccgtttaatctcgggcgcttaattcgcctcgtgaaagaatatcatctgctgaacccggtcattgttgactgcacttccagccaggcagtggcggatcaatatgccgacttcctgcgcgaaggtttccacgttgtcacgccgaacaaaaaggccaacaccagcagcatggattactaccatcagttgcgttatgcggcggaaaaaagccggcgtaaattcctctatgacaccaacgttggggctggattaccggttattgagaacctgcaaaatctgctcaatgcaggtgatgaattgatgaagttctccggcattctttctggtagcctttcttatatcttcggcaagttagacgaaggcatgagtttctccgaggcgaccacgctggcgcgggaaatgggttataccgaaccggacccgcgagatgatctttctggtatggatgtggcgcgtaaactattgattctcgctcgtgaaacgggacgtgaactggagctggcggatattgaaattgaacctgtgctgcccgcagagtttaacgccgagggtgatgttgccgcttttatggcgaatctgagtcaactcgacgatctctttgccgcgcgcgtggcgaaggcccgtgatgaaggaaaagttttgcgctatgttggcaatattgatgaagatggcgtctgccgcgtgaagattgccgaagtggatggtaatgatccgctgttcaaagtgaaaaatggcgaaaacgccctggccttctatagccactattatcagccgctgccgttggtactgcgcggatatggtgcgggcaatgacgttacagctgccggtgtctttgctgatctgctacgtaccctcagttggaagttaggagtctgacatggttaaagtttatgccccggcttccagtgccaatatgagcgtcgggtttgatgtgctcggggcggcggtgacacctgttgatggtgcattgctcggagatgtagtcacggttgaggcggcagagacattcagtctcaacaacctcggacgctttgccgataagctgccgagtgaaccacgggaaaatatcgtttatcagtgctgggagcgtttttgccaggaactgggtaagcaaattccagtggcgatgaccctggaaaagaatatgccgatcggtagcggcttaggctccagtgcctgtagcgtggtcgcggcgctgatggcgatgaatgaacactgcggcaagccgcttaatgacactcgtttgctggctttgatgggcgagctggaaggccgtatctccggcagcattcattacgacaacgtggcaccgtgttttctcggtggtatgcagttgatgatcgaagaaaacgacatcatcagccagcaagtgccagggtttgatgagtggctgtgggtgctggcgtatccggggattaaagtcagcacggcagaagccagggctattttaccggcgcagtatcgccgccaggattgcattgcgcacgggcgacatctggcaggcttcattcacgcctgctattcccgtcagcctgagcttgccgcgaagctgatgaaagatgttatcgctgaaccctaccgtgaacggttactgccaggcttccggcaggcgcggcaggcggtcgcggaaatcggcgcggtagcgagcggtatctccggctccggcccgaccttgttcgctctgtgtgacaagccggaaaccgcccagcgcgttgccgactggttgggtaagaactacctgcaaaatcaggaaggttttgttcatatttgccggctggatacggcgggcgcacgagtactggaaaactaaatgaaactctacaatctgaaagatcacaacgagcaggtcagctttgcgcaagccgtaacccaggggttgggcaaaaatcaggggctgttttttccgcacgacctgccggaattcagcctgactgaaattgatgagatgctgaagctggattttgtcacccgcagtgcgaagatcctcagcgcgtttattggtgatgaaatcccacaggaaatcctggaagagcgcgtgcgcgcggcgtttgccttcccggctccggtcgccaatgttgaaagcgatgtcggttgtctggaattgttccacgggccaacgctggcatttaaagatttcggcggtcgctttatggcacaaatgctgacccatattgcgggtgataagccagtgaccattctgaccgcgacctccggtgataccggagcggcagtggctcatgctttctacggtttaccgaatgtgaaagtggttatcctctatccacgaggcaaaatcagtccactgcaagaaaaactgttctgtacattgggcggcaatatcgaaactgttgccatcgacggcgatttcgatgcctgtcaggcgctggtgaagcaggcgtttgatgatgaagaactgaaagtggcgctagggttaaacagcgctaacagcattaacatcagccgtttgctggcgcagatttgctactactttgaagctgttgcgcagctgccgcaggagacgcgcaaccagctggttgtcagcgtgccaagcggaaacttcggcgatttgacggcgggtctgctggcgaagagtctcggtctgccggtgaaacgttttattgctgcgaccaacgtgaacgataccgtgccacgtttcctgcacgacggtcagtggagtcccaaagcgactcaggcgacgttatccaacgcgatggacgtgagtcagccgaacaactggccgcgtgtggaagagttgttccgccgcaaaatctggcaactgaaagagctgggttatgcagccgtggatgatgaaaccacgcaacagacaatgcgtgagttaaaagaactgggctacactagcgagccgcacgctgccgtagcttatcgtgcgctgcgtgatcagttgaatccaggcgaatatggcttgttcctcggcaccgcgcatccggcgaaatttaaagagagcgtggaagcgattctcggtgaaacgttggatctgccaaaagagctggcagaacgtgctgatttacccttgcttagtcataatctgcccgccgattttgctgcgttgcgtaaattgatgatgaatcatcagtaaaatctattcattatctcaatcaggccgggtttgcttttatgcagcccggcttttttatgaagaaattatggagaaaaatgacagggaaaaaggagaaattctcaataaatgcggtaacttagagattaggattgcggagaataacaaccgccgttctcatcgagtaatctccggatatcgacccataacgggcaatgataaaaggagtaacctgtgaaaaagatgcaatctatcgtactcgcactttccctggttctggtcgctcccatggcagcacaggctgcggaaattacgttagtcccgagtgtaaaattacagataggcgatcgtgataatcgtggctattactgggatggaggtcactggcgcgaccacggctggtggaaacaacattatgaatggcgaggcaatcgctggcacctacacggaccgccgccaccgccgcgccaccataagaaagctcctcatgatcatcacggcggtcatggtccaggcaaacatcaccgctaaatgacaaatgccgggtaacaatccggcattcagcgcctgatgcgacgctggcgcgtcttatcaggcctacgttaattctgcaatatattgaatctgcatgcttttgtaggcaggataaggcgttcacgccgcatccggcattgactgcaaacttaacgctgctcgtagcgtttaaacaccagttcgccattgctggaggaatcttcatcaaagaagtaaccttcgctattaaaaccagtcagttgctctggtttggtcagccgattttcaataatgaaacgactcatcagaccgcgtgctttcttagcgtagaagctgatgatcttaaatttgccgttcttctcatcgaggaacaccggcttgataatctcggcattcaatttcttcggcttcacgcttttaaaatactcatcactcgccagattaatcaccacattatcgccttgtgctgcgagcgcctcgttcagcttgttggtgatgatatctccccagaattgatacagatctttccctcgggcattctcaagacggatccccatttccagacgataaggctgcattaaatcgagcgggcggagtacgccatacaagccggaaagcattcgcaaatgctgttgggcaaaatcgaaatcgtcttcgctgaaggtttcggcctgcaagccggtgtagacatcacctttaaacgccagaatcgcctggcgggcattcgccggcgtgaaatctggctgccagtcatgaaagcgagcggcgttgatacccgccagtttgtcgctgatgcgcatcagcgtgctaatctgcggaggcgtcagtttccgcgcctcatggatcaactgctgggaattgtctaacagctccggcagcgtatagcgcgtggtggtcaacgggctttggtaatcaagcgttttcgcaggactaataagaatcagcatatccagtccttgcaggaaatttatgccgactttagcaaaaaatgagaatgagttgatcgatagttgtgattactcctggctaacatcatcccacgcgtccggagaaagctggcgaccgatatccggataacgcaatggatcaaacaccgggcgcacgccgagtttacgctggcgtagataatcactggcaatggtatgaaccacagggctgagcagtaaaatggcggtcaaattggtaatagccatgcaggccattatgatatctgccagttgccacatcagcggaaggcttagcaaggtgccgccgatgaccgttgcgaaggtgcagatccgcaaacaccagatcgctttagggttgttcaggcgtaaaaagaagagattgttttcggcataaatgtagttggcaacgatggagctgaaggcaaacagaataaccacaagggtaacaaactcagcaccccaggaacccattagcacccgcatcgccttctggataagctgaataccttccagcggcatgtaggttgtgccgttacccgccagtaatatcagcatggcgcttgccgtacagatgaccagggtgtcgataaaaatgccaatcatctggacaatcccttgcgctgccggatgcggaggccaggacgccgctgccgctgccgcgtttggcgtgctacccattcccgcctcattggaaaacatactgcgctgaaaaccgttagtaatcgcctggcttaaggtatatcccgccgcgccgcctgccgcttcctgccagccaaaagcactctcaaaaatagaccaaatgacgtggggaagttgcccgatattcattacgcaaattaccaggctggtcagtacccagattatcgccatcaacgggacaaagccctgcatgagccgggcgacgccatgaagaccgcgagtgattgccagcagagtaaagacagcgagaataatgcctgtcaccagcgggggaaaatcaaaagaaaaactcagggcgcgggcaacggcgttcgcttgaactccgctgaaaattatgccataggcgatgagcaaaaagacggcgaacagaacgcccatccagcgcatccccagcccgcgcgccatataccatgccggtccgccacgaaactgcccattgacgtcacgttctttataaagttgtgccagagaacattcggcaaagctggtcgccatgccgataaacgcggcaacccacatccaaaagacggctccaggtccaccggcggtaatagccagcgcaacgccggccaggttgccgctacccacgcgcgccgcaagactggtacacaaactctgaaaactggttaaaccgcctggctgtggatgaatgctatttttaagacttttgccaaactggcggatgtagcgaaactgcacaaatccggtgcgaaaagtgaaccaacaacctgcgccgaagagcaggtaaatcattacgcttccccaaaggacgctgttaatgaaggagaaaaaatctggcatgcatatccctcttattgccggccgcgatgactttcctgtgtaaacgttaccaattgtttaagaagtatatacgctacgaggtacttgataacttctgcgtagcatacatgaggttttgtataaaaatggcgggcgatatcaacgcagtgtcagaaatccgaaacagtctcgcctggcgataaccgtcttgtcggcggttgcgctgacgttgcgtcgtgatatcatcagggcagaccggttacatccccctaacaagctgtttaaagagaaatactatcatgacggacaaattgacctcccttcgtcagtacaccaccgtagtggccgacactggggacatcgcggcaatgaagctgtatcaaccgcaggatgccacaaccaacccttctctcattcttaacgcagcgcagattccggaataccgtaagttgattgatgatgctgtcgcctgggcgaaacagcagagcaacgatcgcgcgcagcagatcgtggacgcgaccgacaaactggcagtaaatattggtctggaaatcctgaaactggttccgggccgtatcagtactgaagttgatgcgcgtctttcctatgacaccgaagcgagtattgcgaaagcaaaacgcctgatcaaactctacaacgatgctggtattagcaacgatcgtattctgatcaaactggcttctacctggcagggtatccgtgctgcagaacagctggaaaaagaaggcatcaactgtaacctgaccctgctgttctccttcgctcaggctcgtgcttgtgcggaagcgggcgtgttcctgatcagcccgtttgttggccgtattcttgactggtacaaagcgaataccgataagaaagagtacgctccggcagaagatccgggcgtggtttctgtatctgaaatctaccagtactacaaagagcacggttatgaaaccgtggttatgggcgcaagcttccgtaacatcggcgaaattctggaactggcaggctgcgaccgtctgaccatcgcaccggcactgctgaaagagctggcggagagcgaaggggctatcgaacgtaaactgtcttacaccggcgaagtgaaagcgcgtccggcgcgtatcactgagtccgagttcctgtggcagcacaaccaggatccaatggcagtagataaactggcggaaggtatccgtaagtttgctattgaccaggaaaaactggaaaaaatgatcggcgatctgctgtaatcattcttagcgtgaccgggaagtcggtcacgctacctcttctgaagcctgtctgtcactcccttcgcagtgtatcattctgtttaacgagactgtttaaacggaaaaatcttgatgaatactttacgtattggcttagtttccatctctgatcgcgcatccagcggcgtttatcaggataaaggcatccctgcgctggaagaatggctgacaagcgcgctaaccacgccgtttgaactggaaacccgcttaatccccgatgagcaggcgatcatcgagcaaacgttgtgtgagctggtggatgaaatgagttgccatctggtgctcaccacgggcggaactggcccggcgcgtcgtgacgtaacgcccgatgcgacgctggcagtagcggaccgcgagatgcctggctttggtgaacagatgcgccagatcagcctgcattttgtaccaactgcgatccttagccgtcaggtgggcgtgattcgcaaacaggcgctgatccttaacttacccggtcagccgaagtctattaaagagacgctggaaggtgtgaaggacgctgagggtaacgttgtggtacacggtatttttgccagcgtaccgtactgcattcagttgctggaagggccatacgttgaaacggcaccggaagtggttgcagcattcagaccgaagagtgcaagacgcgacgttagcgaataaaaaaatccccccgagcggggggatctcaaaacaattagtgggattcaccaatcggcagaacggtgcgaccaaactgctcgttcagtacttcacccatcgccagatagattgcgctggcaccgcagatcagcccaatccagccggcaaagtggatgattgcggcgttaccggcaatgttaccgatcgccagcagggcaaacagcacggtcaggctaaagaaaacgaattgcagaacgcgtgcgcctttcagcgtgccgaagaacataaacagcgtaaatacgccccacagacccaggtagacaccaaggaactgtgcatttggcgcatcggtcagacccagtttcggcatcagcagaatcgcaaccagcgtcagccagaaagaaccgtaagaggtgaatgcggttaaaccgaaagtgttgccttttttgtactccagcagaccagcaaaaatttgcgcgatgccgccgtagaaaatgcccatggcaagaataataccgtccagagcgaaataacccacgttgtgcaggttaagcagaatggtggtcatgccgaagcccatcaggcccagcggtgccggattagccaacttagtgttgcccataattcctcaaaaatcatcatcgaatgaatggtgaaataatttccctgaataactgtagtgttttcagggcgcggcataataatcagccagtggggcagtgtctacgatcttttgaggggaaaatgaaaattttccccggtttccggtatcagacctgagtggcgctaaccatccggcgcaggcaggcgatttgcagtacggctggaatcgtcacgcgataggcgctgccgctgaccgctttaaccccatttagtgccgcacctacagggcctcccagccccgcgccgcgcagcaaaccatgcccaagtacgctcattgctgcgtgggtgcgtaaaatgcgggtcagttggctggaaagcaaatggctcacaccttttgccaataatttgtctttcatcagcagcggcagcagctcttccagctcattcaccctggcatcgaccgcgtgcagaaactcctgcttatgttcctcgtccattttcttccaggtattacgcagaaattgttccagtaactgttgctcaatttcaaacgtagacatctctttgtcggctttcagcttcaatcgcttactaacatcgagcaaaatggcccgatacaatttaccgtgtccgcgcagtttgttggcgatactatcgccaccaaaatgctgtaattctccggcaatcagctgccagttgcggcgatgttgctcgggatgcccttccatgcttttaaacagttcgttgcgcatcagtacgctggagaggcgagttttgcctttttcattatgggtgagcaatcgggcgaaatttgccaactgttcctcactacaatgctgaagaaaatccagatcactatcattcaggtaattaacattcattttttgtggcttctatattctggcgttagtcgtcgccgataattttcagcgtggccatatcgctactgttcaccgtatgaccgctaaaggtgattttactgacgcagcgtttattgtcgttatcgctgttaatgttgatccagtcagtggtttgcccttcttttatttcactaggaatattcaggctctgactggcgctacgggcggctttgaaataaacgcttgcaccgcttaactgtaaatcgccatggtcggcagagagttgtatgcgtttcacaatgcgacaaacaggaagtttcagcgccagatcgttggtttcgttacgcggcattgcaatggcgccgaggagtttatggtcgtttgcctgcgccgtgcagcacagcatcaggctaatcgccaggctggcggaaatcgtaaaaacggatttcataaggattctcttagtgggaagaggtagggggatgaatacccactagtttactgctgataaagagaagattcaggcacgtaatcttttctttttattacaattttttgatgaatgccttggctgcgattcattctttatatgaataaaattgctgtcaattttacgtcttgtcctgccatatcgcgaaatttctgcgcaaaagcacaaaaaatttttgcatctcccccttgatgacgtggtttacgaccccatttagtagtcaaccgcagtgagtgagtctgcaaaaaaatgaaattgggcagttgaaaccagacgtttcgcccctattacagactcacaaccacatgatgaccgaatatatagtggagacgtttagatgggtaaaataattggtatcgacctgggtactaccaactcttgtgtagcgattatggatggcaccactcctcgcgtgctggagaacgccgaaggcgatcgcaccacgccttctatcattgcctatacccaggatggtgaaactctagttggtcagccggctaaacgtcaggcagtgacgaacccgcaaaacactctgtttgcgattaaacgcctgattggtcgccgcttccaggacgaagaagtacagcgtgatgtttccatcatgccgttcaaaattattgctgctgataacggcgacgcatgggtcgaagttaaaggccagaaaatggcaccgccgcagatttctgctgaagtgctgaaaaaaatgaagaaaaccgctgaagattacctgggtgaaccggtaactgaagctgttatcaccgtaccggcatactttaacgatgctcagcgtcaggcaaccaaagacgcaggccgtatcgctggtctggaagtaaaacgtatcatcaacgaaccgaccgcagctgcgctggcttacggtctggacaaaggcactggcaaccgtactatcgcggtttatgacctgggtggtggtactttcgatatttctattatcgaaatcgacgaagttgacggcgaaaaaaccttcgaagttctggcaaccaacggtgatacccacctggggggtgaagacttcgacagccgtctgatcaactatctggttgaagaattcaagaaagatcagggcattgacctgcgcaacgatccgctggcaatgcagcgcctgaaagaagcggcagaaaaagcgaaaatcgaactgtcttccgctcagcagaccgacgttaacctgccatacatcactgcagacgcgaccggtccgaaacacatgaacatcaaagtgactcgtgcgaaactggaaagcctggttgaagatctggtaaaccgttccattgagccgctgaaagttgcactgcaggacgctggcctgtccgtatctgatatcgacgacgttatcctcgttggtggtcagactcgtatgccaatggttcagaagaaagttgctgagttctttggtaaagagccgcgtaaagacgttaacccggacgaagctgtagcaatcggtgctgctgttcagggtggtgttctgactggtgacgtaaaagacgtactgctgctggacgttaccccgctgtctctgggtatcgaaaccatgggcggtgtgatgacgacgctgatcgcgaaaaacaccactatcccgaccaagcacagccaggtgttctctaccgctgaagacaaccagtctgcggtaaccatccatgtgctgcagggtgaacgtaaacgtgcggctgataacaaatctctgggtcagttcaacctagatggtatcaacccggcaccgcgcggcatgccgcagatcgaagttaccttcgatatcgatgctgacggtatcctgcacgtttccgcgaaagataaaaacagcggtaaagagcagaagatcaccatcaaggcttcttctggtctgaacgaagatgaaatccagaaaatggtacgcgacgcagaagctaacgccgaagctgaccgtaagtttgaagagctggtacagactcgcaaccagggcgaccatctgctgcacagcacccgtaagcaggttgaagaagcaggcgacaaactgccggctgacgacaaaactgctatcgagtctgcgctgactgcactggaaactgctctgaaaggtgaagacaaagccgctatcgaagcgaaaatgcaggaactggcacaggtttcccagaaactgatggaaatcgcccagcagcaacatgcccagcagcagactgccggtgctgatgcttctgcaaacaacgcgaaagatgacgatgttgtcgacgctgaatttgaagaagtcaaagacaaaaaataatcgccctataaacgggtaattatactgacacgggcgaaggggaatttcctctccgcccgtgcattcatctaggggcaatttaaaaaagatggctaagcaagattattacgagattttaggcgtttccaaaacagcggaagagcgtgaaatcagaaaggcctacaaacgcctggccatgaaataccacccggaccgtaaccagggtgacaaagaggccgaggcgaaatttaaagagatcaaggaagcttatgaagttctgaccgacagccaaaaacgtgcggcatacgatcagtatggtcatgctgcgtttgagcaaggtggcatgggcggcggcggttttggcggcggcgcagacttcagcgatatttttggtgacgttttcggcgatatttttggcggcggacgtggtcgtcaacgtgcggcgcgcggtgctgatttacgctataacatggagctcaccctcgaagaagctgtacgtggcgtgaccaaagagatccgcattccgactctggaagagtgtgacgtttgccacggtagcggtgcaaaaccaggtacacagccgcagacttgtccgacctgtcatggttctggtcaggtgcagatgcgccagggattcttcgctgtacagcagacctgtccacactgtcagggccgcggtacgctgatcaaagatccgtgcaacaaatgtcatggtcatggtcgtgttgagcgcagcaaaacgctgtccgttaaaatcccggcaggggtggacactggagaccgcatccgtcttgcgggcgaaggtgaagcgggcgagcatggcgcaccggcaggcgatctgtacgttcaggttcaggttaaacagcacccgattttcgagcgtgaaggcaacaacctgtattgcgaagtcccgatcaacttcgctatggcggcgctgggtggcgaaatcgaagtaccgacccttgatggtcgcgtcaaactgaaagtgcctggcgaaacccagaccggtaagctattccgtatgcgcggtaaaggcgtcaagtctgtccgcggtggcgcacagggtgatttgctgtgccgcgttgtcgtcgaaacaccggtaggcctgaacgaaaggcagaaacagctgctgcaagagctgcaagaaagcttcggtggcccaaccggcgagcacaacagcccgcgcagtaagagcttctttgatggtgtgaagaagttttttgacgacctgacccgctaacctccccaaaagcctgcccgtgggcaggcctgggtaaaaatagggtgcgttgaagatatgcgagcacctgtaaagtggcggggatcactctacctcaatgtgtatcacaatatccatattctttgtgggggagtctggagattgagtagatattcttgttcagaatgtatcagccgatggttctacgattcttaagccacgaagagttcagatagtacaacggcatgtctcttttgactatctggcaaccggcagtgtgttctctcacgcatcacaaaagcagcaggcataaaaaaacccgcttgcgcgggctttttcacaaagcttcagcaaattggcgattaagccagtttgttgatctgtgcagtcaggttagccttatgacgtgcagctttgtttttgtggatcagacctttagcagcctgacggtccacgatcggttgcatttcgttaaatgctttctgtgcagcagctttgtcgccagcttcgatagctgcgtatactttcttgatgaaagtacgcatcatagagcgacggcttgcgttgtgcttacgagccttttcagactgaatggcgcgcttcttagcacttttgatattagccaaggtccaactcccaaatgtgttctatatggacaattcaaaggccgaggaatatgcccttttagccttcttttgtcaatggatttgtgcaaataagcgccgttaatgtgccggcacagcttacgtagtgatggcgcaggattctaccagcttgcggggtgtgaatacagcttttccgcgataaaaattgcagcaggcggtcagtttcttcccgtgatttgcgccatggcaatgaaaagccacttctttctgattagcgtactcaatcgccggttaaccttgaccgctgtacaaggtatactcggacgatttagcctgttttgagccagacatgaagctgatacgcggcatacataatctcagccaggccccgcaagaagggtgtgtgctgactattggtaatttcgacggcgtgcatcgcggtcatcgcgcgctgttacagggcttgcaggaagaagggcgcaagcgcaacttaccggtgatggtgatgctttttgaacctcaaccactggaactgtttgctaccgataaagccccggcaagactgacccggctgcgggaaaaactgcgttaccttgcagagtgtggcgttgattacgtgctgtgcgtgcgtttcgacaggcgtttcgcggcgttaaccgcgcaaaatttcatcagcgatcttctggtgaagcatttgcgcgtaaaatttcttgccgtaggtgatgatttccgctttggcgctggtcgtgaaggcgatttcttgttattacagaaagctggcatggaatacggcttcgatatcaccagtacgcaaactttttgcgaaggtggcgtgcgcatcagcagcaccgccgtgcgtcaggcccttgcggatgacaatctggctctggcagagagtttactggggcacccgtttgccatctccgggcgtgtagtccacggtgatgaattagggcgcactataggtttcccgacggcgaatgtaccgctgcgccgtcaggtttccccggtgaaaggggtttatgcggtagaagtgctgggcctcggtgaaaagccgttacccggcgtggcaaacatcggaacacgcccaacggttgccggtattcgccagcagctggaagtgcatttgttagatgttgcaatggacctttacggtcgccatatacaagtagtgctgcgtaaaaaaatacgcaatgagcagcgatttgcgagcctggacgaactgaaagcgcagattgcgcgtgatgaattaaccgcccgcgaattttttgggctaacaaaaccggcttaagcctgttatgtaatcaaaccgaaatacggaaccgagaatctgatgagtgactataaaagtaccctgaatttgccggaaacagggttcccgatgcgtggcgatctcgccaagcgcgaacccggaatgctggcgcgttggactgatgatgatctgtacggcatcatccgtgcggctaaaaaaggcaaaaaaaccttcattctgcatgatggccctccttatgcgaatggcagcattcatattggtcacagcgttaacaagattctgaaagacattatcgtgaagtccaaagggctttccggttatgacagcccgtatgtgcctggctgggactgccacggtctgccgatcgagctgaaagtcgagcaagaatacggtaagccgggtgagaaattcaccgccgccgagttccgcgccaagtgccgcgaatacgcggcgacccaggttgacggtcaacgcaaagactttatccgtctgggcgtgctgggcgactggagccacccgtacctgaccatggacttcaaaactgaagccaacatcatccgcgcgctgggcaaaatcatcggcaacggtcacctgcacaaaggcgcgaagccagttcactggtgcgttgactgccgttctgcgctggcggaagcggaagttgagtattacgacaaaacttctccgtccatcgacgttgctttccaggcagtcgatcaggatgcactgaaagcaaaatttgccgtaagcaacgttaacggcccaatcagcctggtaatctggaccaccacgccgtggactctgcctgccaaccgcgcaatctctattgcaccagatttcgactatgcgctggtgcagatcgacggtcaggccgtgattctggcgaaagatctggttgaaagcgtaatgcagcgtatcggcgtgaccgattacaccattctcggcacggtaaaaggtgcggagcttgagctgctgcgctttacccatccgtttatgggcttcgacgttccggcaatcctcggcgatcacgttaccctggatgccggtaccggtgccgttcacaccgcgcctggccacggcccggacgactatgtgatcggtcagaaatacggcctggaaaccgctaacccggttggcccggacggcacttatctgccgggcacttatccgacgctggatggcgtgaacgtcttcaaagcgaacgacatcgtcgttgcgctgctgcaggaaaaaggcgcgctgctgcacgttgagaaaatgcagcacagctatccgtgctgctggcgtcacaaaacgccgatcatcttccgcgcgacgccgcagtggttcgtcagcatggatcagaaaggtctgcgtgcgcagagtctgaaagagatcaaaggcgtgcagtggatcccggactggggccaggcgcgtatcgagagcatggttgctaaccgtcctgactggtgtatctcccgtcagcgcacctggggtgtaccgatgagtctgttcgtgcacaaagacacggaagagctgcatccgcgtacccttgaactgatggaagaagtggcaaaacgcgttgaagtcgatggcatccaggcgtggtgggatctcgatgcgaaagagatcctcggcgacgaagctgatcagtacgtgaaagtgccggacacattggatgtatggtttgactccggatctacccactcttctgttgttgacgtgcgtccggaatttgccggtcacgcagcggacatgtatctggaaggttctgaccaacaccgcggctggttcatgtcttccctaatgatctccaccgcgatgaagggtaaagcgccgtatcgtcaggtactgacccacggctttaccgtggatggtcagggccgcaagatgtctaaatccatcggcaataccgttagcccgcaggatgtgatgaacaaactgggcgcggatattctgcgtctgtgggtggcaagtaccgactacaccggtgaaatggccgtttctgacgagatcctgaaacgtgctgccgatagctatcgtcgtatccgtaacaccgcgcgcttcctgctggcaaacctgaacggttttgatccagcaaaagatatggtgaaaccggaagagatggtggtactggatcgctgggccgtaggttgtgcgaaagcggcacaggaagacatcctcaaggcgtacgaagcatacgatttccacgaagtggtacagcgtctgatgcgcttctgctccgttgagatgggttccttctacctcgacatcatcaaagaccgtcagtacaccgccaaagcggacagtgtggcgcgtcgtagctgccagactgcgctatatcacatcgcagaagcgctggtgcgctggatggcaccaatcctctccttcaccgctgatgaagtgtggggctacctgccgggcgaacgtgaaaaatacgtcttcaccggtgagtggtacgaaggcctgtttggcctggcagacagtgaagcgatgaacgatgcgttctgggacgagctgttgaaagtgcgtggcgaagtgaacaaagtcattgagcaagcgcgtgccgacaagaaagtgggtggcagcctggaagcggcagtaaccttgtatgcagaaccggaactgagcgcgaaactgaccgcgctgggcgatgaattacgatttgtcctgttgacctccggcgctaccgttgcagactataacgacgcacctgctgatgctcagcagagcgaagtactcaaagggctgaaagtcgcgttgagtaaagccgaaggtgagaagtgcccacgctgctggcactacacccaggatgtcggcaaggtggcggaacacgcagaaatctgcggccgctgtgtcagcaacgtcgccggtgacggtgaaaaacgtaagtttgcctgatgagtcaaagcatctgtagtacagggctacgctggctgtggctggtggtagtcgtgctgattatcgatctgggcagcaaatacctgatcctccagaactttgctctgggggatacggtcccgctgttcccgagccttaatctgcattatgcgcgtaactatggcgcggcgtttagtttccttgccgatagcggcggctggcagcgttggttctttgccggtattgcgattggtattagcgtgatcctggcagtgatgatgtatcgcagcaaggccacgcagaagctaaacaatatcgcttacgcgctgattattggcggcgcgctgggcaacctgttcgaccgcctgtggcacggcttcgttgtcgatatgatcgacttctacgtcggcgactggcacttcgccaccttcaaccttgccgatactgccatctgtgtcggtgcggcactgattgtgctggaaggttttttgccttctagagcgaaaaaacaataataaaccctgccggatgcgatgctgacgcatcttatccggcctacagattgctgcgaaatcgtaggccggataaggcgtttacgccgcatccggcaaaaatccttaaatataagagcaaacctgcatgtctgaatctgtacagagcaatagcgccgtcctggtgcacttcacgctaaaactcgacgatggcaccaccgccgagtctacccgcaacaacggtaaaccggcgctgttccgcctgggtgatgcttctctttctgaagggctggagcaacacctgttggggctgaaagtgggcgataaaaccaccttcagcttggagccagatgcggcgtttggcgtgccgagtccggacctgattcagtacttctcccgccgtgaatttatggatgcaggcgagccagaaattggcgcaatcatgctttttaccgcaatggatggcagtgagatgcctggcgtgatccgcgaaattaacggcgactccattaccgttgatttcaaccatccgctggccgggcagaccgttcattttgatattgaagtgctggaaatcgatccggcactggaggcgtaacatgcagatcctgttggccaacccgcgtggtttttgtgccggggtagaccgcgctatcagcattgttgaaaacgcgctggccatttacggcgcaccgatatatgtccgtcacgaagtggtacataaccgctatgtggtcgatagcttgcgtgagcgtggggctatctttattgagcagattagcgaagtaccggacggcgcgatcctgattttctccgcacacggtgtttctcaggcggtacgtaacgaagcaaaaagtcgcgatttgacggtgtttgatgccacctgtccgctggtgaccaaagtgcatatggaagtcgcccgcgccagtcgccgtggcgaagaatctattctcatcggtcacgccgggcacccggaagtggaagggacaatgggccagtacagtaacccggaagggggaatgtatctggtcgaaagcccggacgatgtgtggaaactgacggtcaaaaacgaagagaagctctcctttatgacccagaccacgctgagcgtggatgacacgtctgatgtgatcgacgcgctgcgtaaacgcttcccgaaaattgtcggtccgcgcaaagatgacatctgctacgccacgactaaccgtcaggaagcggtacgcgccctggcagaacaggcggaagttgtgttggtggtcggtagcaaaaactcctccaactccaaccgtctggcggagctggcccagcgtatgggcaaacgcgcgtttttgattgacgatgcgaaagacatccaggaagagtgggtgaaagaggttaaatgcgtcggcgtgactgcgggcgcaagcgctccggatattctggtgcagaatgtggtggcacgtttgcagcagctgggcggtggtgaagccattccgctggaaggccgtgaagaaaacattgttttcgaagtgccgaaagagctgcgtgtcgatattcgtgaagtcgattaagtcattagcagcctaagttatgcgaaaatgccggtcttgttaccggcattttttatggagaaaacatgcgtttacctatcttcctcgatactgaccccggcattgacgatgccgtcgccattgccgccgcgatttttgcacccgaactcgacctgcaactgatgaccaccgtcgcgggtaatgtcagcgttgagaaaactacccgcaatgccctgcaactgctgcatttctggaatgcggagattccgctcgcccaaggggccgctgtgccactggtacgcgcaccgcgtgatgcggcatctgtgcacggcgaaagcggaatggctggctacgactttgttgagcacaaccgaaagccgctcgggataccggcgtttctggcgattcgggatgccctgatgcgtgcaccagagcctgttaccctggtggccatcggcccgttaaccaatattgcgctgttacttagtcaatgcccggaatgcaagccgtatattcgccgtctggtgatcatgggtggttctgccggacgcggcaactgtacgccaaacgccgagtttaatattgctgccgatccagaagctgctgcctgtgtcttccgcagtggtattgaaatcgtcatgtgcggtttggatgtcaccaatcaggcaatattaactcctgactatctctctacactgccgcagttaaaccgtaccgggaaaatgcttcacgccctgtttagccactaccgtagcggcagtatgcaaagcggcttgcgaatgcacgatctctgcgccatcgcctggctggtgcgcccggacctgttcactctcaaaccctgttttgtggcagtggaaactcagggcgaatttaccagtggcacgacggtggttgatatcgacggttgcctgggcaagccagccaatgtacaggtggcattggatctggatgtgaaaggcttccagcagtgggtggctgaggtgctggctctggcgagctaacctgtcacatgttattggcatgcagtcattcatcgactcatgcctttcactgatatccctccctgtttatcattaatttctaattatcagcgtttttggctggcggcgtagcgatgcgctggttactctgaaaacggtctatgcaaattaacaaaagagaatagctatgcatgatgcaaacatccgcgttgccatcgcgggagccggggggcgtatgggccgccagttgattcaggcggcgctggcattagagggcgtgcagttgggcgctgcgctggagcgtgaaggatcttctttactgggcagcgacgccggtgagctggccggagccgggaaaacaggcgttaccgtgcaaagcagcctcgatgcggtaaaagatgattttgatgtgtttatcgattttacccgtccggaaggtacgctgaaccatctcgctttttgtcgccagcatggcaaagggatggtgatcggcactacggggtttgacgaagccggtaaacaagcaattcgtgacgccgctgccgatattgcgattgtctttgctgccaattttagcgttggcgttaacgtcatgcttaagctgctggagaaagcagccaaagtgatgggtgactacaccgatatcgaaattattgaagcacatcatagacataaagttgatgcgccgagtggcaccgcactggcaatgggagaggcgatcgcccacgcccttgataaagatctgaaagattgcgcggtctacagtcgtgaaggccacaccggtgaacgtgtgcctggcaccattggttttgccaccgtgcgtgcaggtgacatcgttggtgaacataccgcgatgtttgccgatattggcgagcgtctggagatcacccataaggcgtccagccgtatgacatttgctaacggcgcggtaagaagcgctttgtggttgagtggtaaggaaagcggtctttttgatatgcgagatgtacttgatctcaataatttgtaaccacaaaatatttgttatggtgcaaaaataacacatttaatttattgattataaagggctttaatttttggcccttttatttttggtgttatgtttttaaattgtctataagtgccaaaaattacatgttttgtcttctgtttttgttgttttaatgtaaattttgaccatttggtccacttttttctgctcgtttttatttcatgcaatcttcttgctgcgcaagcgttttccagaacaggttagatgatctttttgtcgcttaatgcctgtaaaacatgcatgagccacaaaataatataaaaaatcccgccattaagttgacttttagcgcccatatctccagaatgccgccgtttgccagaaattcgtcggtaagcagatttgcattgatttacgtcatcattgtgaattaatatgcaaataaagtgagtgaatattctctggagggtgttttgattaagagtgcgctattggttctggaagacggaacccagtttcacggtcgggccataggggcaacaggtagcgcggttggggaagtcgttttcaatactagtatgaccggttatcaagaaatcctcactgatccttcctattctcgtcaaatcgttactcttacttatccccatattggcaatgtcggcaccaatgacgccgatgaagaatcttctcaggtacatgcacaaggtctggtgattcgcgacctgccgctgattgccagcaacttccgtaataccgaagacctctcttcttacctgaaacgccataacatcgtggcgattgccgatatcgatacccgtaagctgacgcgtttactgcgcgagaaaggcgcacagaatggctgcattatcgcgggcgataacccggatgcggcgctggcgttagaaaaagcccgcgcgttcccaggtctgaatggcatggatctggcaaaagaagtgaccaccgcagaagcctatagctggacacaagggagctggacgttgaccggtggcctgccagaagcgaaaaaagaagacgagctgccgttccacgtcgtggcttatgattttggtgccaagcgcaacatcctgcggatgctggtggatagaggctgtcgcctgaccatcgttccggcgcaaacttctgcggaagatgtgctgaaaatgaatccagacggcatcttcctctccaacggtcctggcgacccggccccgtgcgattacgccattaccgccatccagaaattcctcgaaaccgatattccggtattcggcatctgtctcggtcatcagctgctggcgctggcgagcggtgcgaagactgtcaaaatgaaatttggtcaccacggcggcaaccatccggttaaagatgtggagaaaaacgtggtaatgatcaccgcccagaaccacggttttgcggtggacgaagcaacattacctgcaaacctgcgtgtcacgcataaatccctgttcgacggtacgttacagggcattcatcgcaccgataaaccggcattcagcttccaggggcaccctgaagccagccctggtccacacgacgccgcgccgttgttcgaccactttatcgagttaattgagcagtaccgtaaaaccgctaagtaatcaggagtaaaagagccatgccaaaacgtacagatataaaaagtatcctgattctgggtgcgggcccgattgttatcggtcaggcgtgtgagtttgactactctggcgcgcaagcgtgtaaagccctgcgtgaagagggttaccgcgtcattctggtgaactccaacccggcgaccatcatgaccgacccggaaatggctgatgcaacctacatcgagccgattcactgggaagttgtacgcaagattattgaaaaagagcgcccggacgcggtgctgccaacgatgggcggtcagacggcgctgaactgcgcgctggagctggaacgtcagggcgtgttggaagagttcggtgtcaccatgattggtgccactgccgatgcgattgataaagcagaagaccgccgtcgtttcgacgtagcgatgaagaaaattggtctggaaaccgcgcgttccggtatcgcacacacgatggaagaagcgctggcggttgccgctgacgtgggcttcccgtgcattattcgcccatcctttaccatgggcggtagcggcggcggtatcgcttataaccgtgaagagtttgaagaaatttgcgcccgcggtctggatctctctccgaccaaagagttgctgattgatgagagcctgatcggctggaaagagtacgagatggaagtggtgcgtgataaaaacgacaactgcatcatcgtctgctctatcgaaaacttcgatgcgatgggcatccacaccggtgactccatcactgtcgcgccagcccaaacgctgaccgacaaagaatatcaaatcatgcgtaacgccagcatggcggtgctgcgtgaaatcggcgttgaaaccggtggttccaacgttcagtttgcggtgaacccgaaaaacggtcgtctgattgttatcgaaatgaacccacgcgtgtcccgttctagcgcgctggcgagcaaagcgaccggtttcccgattgctaaagtggcggcgaaactggcggtgggttacaccctcgacgaactgatgaacgacatcactggcggacgtactccggcctccttcgagccgtccatcgactatgtggttactaaaattcctcgcttcaacttcgaaaaattcgccggtgctaacgaccgtctgaccactcagatgaaaagcgttggcgaagtgatggcgattggtcgcacgcagcaggaatccctgcaaaaagcgctgcgcggcctggaagtcggtgcgactggattcgacccgaaagtgagcctggatgacccggaagcgttaaccaaaatccgtcgcgaactgaaagacgcaggcgcagatcgtatctggtacatcgccgatgcgttccgtgcgggcctgtctgtggacggcgtcttcaacctgaccaacattgaccgctggttcctggtacagattgaagagctggtgcgtctggaagagaaagtggcggaagtgggcatcactggcctgaacgctgacttcctgcgccagctgaaacgcaaaggctttgccgatgcgcgcttggcaaaactggcgggcgtacgcgaagcggaaatccgtaagctgcgtgaccagtatgacctgcacccggtttataagcgcgtggatacctgtgcggcagagttcgccaccgacaccgcttacatgtactccacttatgaagaagagtgcgaagcgaatccgtctaccgaccgtgaaaaaatcatggtgcttggcggcggcccgaaccgtatcggtcagggtatcgaattcgactactgttgcgtacacgccagcctggcgctgcgcgaagacggttacgaaaccattatggttaactgtaacccggaaaccgtctccaccgactacgacacttccgaccgcctctacttcgagccggtaactctggaagatgtgctggaaatcgtgcgtatcgagaagccgaaaggcgttatcgtccagtacggcggtcagaccccgctgaaactggcgcgcgcgctggaagctgctggcgtaccggttatcggcaccagcccggatgctatcgaccgtgcagaagaccgtgaacgcttccagcatgcggttgagcgtctgaaactgaaacaaccggcgaacgccaccgttaccgctattgaaatggcggtagagaaggcgaaagagattggctacccgctggtggtacgtccgtcttacgttctcggcggtcgggcgatggaaatcgtctatgacgaagctgacctgcgtcgctacttccagacggcggtcagcgtgtctaacgatgcgccagtgttgctggaccacttcctcgatgacgcggtagaagttgacgtggatgccatctgcgacggcgaaatggtgctgattggcggcatcatggagcatattgagcaggcgggcgtgcactccggtgactccgcatgttctctgccagcctacaccttaagtcaggaaattcaggatgtgatgcgccagcaggtgcagaaactggccttcgaattgcaggtgcgcggcctgatgaacgtgcagtttgcggtgaaaaacaacgaagtctacctgattgaagttaacccgcgtgcggcgcgtaccgttccgttcgtctccaaagccaccggcgtaccgctggcaaaagtggcggcgcgcgtgatggctggcaaaagcctggctgagcagggcgtaaccaaagaagttatcccgccgtactacagcgtgaaagaagtggtgctgccgttcaataaattcccgggcgttgacccgctgttagggccagaaatgcgctctaccggggaagtcatgggcgtgggccgcaccttcgctgaagcgtttgccaaagcgcagctgggcagcaactccaccatgaagaaacacggtcgtgcgctgctttccgtgcgcgaaggcgataaagaacgcgtggtggacctggcggcaaaactgctgaaacagggcttcgagctggatgcgacccacggcacggcgattgtgctgggcgaagcaggtatcaacccgcgtctggtaaacaaggtgcatgaaggccgtccgcacattcaggaccgtatcaagaatggcgaatatacctacatcatcaacaccaccagtggccgtcgtgcgattgaagactcccgcgtgattcgtcgcagtgcgctgcaatataaagtgcattacgacaccaccctgaacggcggctttgccaccgcgatggcgctgaatgccgatgcgactgaaaaagtaattagcgtgcaggaaatgcacgcacagatcaaataatagcgtgtcatggcagatatttttcatccgctaatttgatcgaataactaatacggttctctgatgaggaccgtttttttttgcccattaagtaaatcttttggggaatcgatatttttgatgacataagcaggatttagctcacacttatcgacggtgaagttgcatactatcgatatatccacaattttaatatggccttgtttaattgcttcaaaacgagtcatagccagacttttaatttgtgaaactggagttcgtatgtgtgaaggatatgttgaaaaaccactctacttgttaatcgccgaatggatgatggctgaaaatcggtgggtgatagcaagagagatctctattcatttcgatattgaacacagcaaggcggttaataccctgacttatattctgagcgaagtcacagaaataagctgcgaagttaagatgatccctaataagctggaagggcggggatgccagtgtcagcgactggttaaagtggtcgatatcgatgagcaaatttacgcgcgcctgcgcaataacagtcgggaaaaattagtcggtgtaagaaagacgccgcgtattcctgccgttccgctcacggaacttaaccgcgagcagaagtggcagatgatgttgagtaagagtatgcgtcgttaattttatctcgttgataccgggcgtcctgcttgccagatgcgatgttgtagcatcttatccagcaaccaggtcgcatccggcaagatcaccgtttaggcgtcacatccgtcgtcccctgcaaacgggggcgattttcctccatttgcctcagtggctgcgtttcatgtaagcttacatgacagcgcccgacaagatcctgatactctttggtattcaaccgtttccagtgtaactcgtcgtcactaacattgcgtacagcgcgggctggcgtacccatcaacaactggcgtttctcgccgcgaaagcccgctttgacaaagctcatggcggcaacaatgctctcttcgccaatgaccgcgccatccataatcacgctgttcatcccgaccaatgcatcgcgaccaatcaaacaaccatgcaggatcgctccgtgcccgatatggccgttttccccaacgatagtgtcagtgtcgcagtagccatgcataatgcagccatcctgaatattggctcccgcttgcacgatcaaccgcccgtagtcaccacgcagactggcgagtgggccgatgtagacaccggctcccacaatcacatcgccaatcaagacggcactgggatggacaaacgccgtcgggtgaaccaccggaattaacccctcaaaggcgtaatagctcacggttgttaacgtcctttccacaccggatcgcgcttctcggcaaacgccagcggcccttcaatggcatcttcgctatgcagaacgcttggatagtgtttcaacacgccgctgcgaatatagcgatacgcttcttctaccggcatttcgctggtggtgcggtagatctctttcagcgccgcaatcgccagcggggcgctgttaaccagctgctgagccagttcgcgggcgttatccatcagttccgcctggctaaccacgcggttgactatcccccaacgcagcgcctcttctgcgcccattcgtctgccggtcatcaccatttcattgacgatggcaggcggcaggatcttcggcagacgcagcacaccgccgctgtcaggaacgatgcccagtttggcttccggcagggcgaagctggcgttatcggcacaaacaataaaatctgccgccagcgccagttcaaagccgccgccaaaggcatagccgttcacagctgcgataaccggtttgtcgagattgaaaatttcggttaatcccgcaaaaccacccggaccaaagtcagcatccggtgcttcgccttctgctgccgcttttaaatcccagcccgcggaaaagaacttctctccggcaccggtaataatggcgacacgtaattgcggatcgtcacggaaatttagaaatacttcgcccatttcaaagctggtttttgcatcaatagcattcgcttttggacgatcaagggtaatttccagaatacttccattgcgggtcagatgtaaactttcactcattccttttctccatttttgctttttcagggagctcaacatccctgcaaaaaatgcatattgttttagagtgtgattattagctggcagggtagttccctgctgtttcatttatttcagattctttctaattattttcccgctgcaattacgtggcagatcttttctgatctccagataagagggcactttaaatttcgccatattttgttcgcagaagcggaaaaattcctcttcgctcaatgtttcaccttcattcagcaccacaaatgctttgatggcttcatcgcgaatgctatctttaatacccacaaccacgatgtcctgaattttcgggtgcgcggcgataatattttccagctccacgcaggagacattctcgccgccacgtttaatcatattgcagcggcgatcgacgaaataaaaaaagtcctcttcgtcgcggtatccggtatcgccggtatgcagccagccatcggcttccagcactttcgcagtggcttgtgggttgagaaagtactctttgaagatggttttcccaggtatgcctttaatgcagatttcaccgatctcaccagccgggagcgggcgattgtgatcgtcgcggatctccgcttcgtagcaaaaccccacccgaccaatgctcggccagcgtcgtttatcgccaggacgatcgccgataatgcccacaatggtttccgtcatcccataagacgtcagcaagcgaacgccgaagcgttcacaaaacgcatctttttcctgctcgctcaagttgagataaaacatcacttcccgcaggcggtgttgctgatcgttcgcactaggcggctgtaccatcaacgtacggatcatcatcggaatacattcggtaacggtggcgcggtacttctgtacctgtccccagaaggcgcgggcgctgtatttctcgaccagcacaaaggtggccccggcagaaaacgccgccatcgccgcagtacactggcaatcgatatgaaacgcaggcattaccgtcaggtagacgtcatcgtcacgcagtgcacactgccaggcggagtaatatccagcgaagcgcaggttgtaatgggtaatcaccacacctttcggtcgggaggtggtgccggaggtgaagagaatttccgccgtatcgtcagtgcttagcggcggtgcatagcacaaggtggcaggttgttgatttttcagttgagtaaagctactcacgccatcatcagcgggaagtgccacatctgtcaggcaaatgtgccgcaattgagtggcatcttcctgctgaatctgttgatacataggatagaattgcgcactggtcaccagcaggcacgcctggctattttgcaggatccacgcgctttcctcgcacaacaggcgggcgttaatcggcaccataatcgcgccaatttttgccagcccgaaccagcaaaagataaattccgggcagttgtcgagatgtagtgcaaccttgtcgcctttgcgaatccccagcgtataaaacaggtttgccgtgcggttaatctcctgatttaactcaagataactataccggttaacgactccgccgctggattcacaaatcagcgccgttttatgaccgtaaacgtccgcaagatcgtcccacatttgacgtagatgttgtccgccaatgatatccattgcacctctatccatttttgttcgtttgttattgggcgggcgctagtcaggcaagccgactgacgccacgcgtttagtcctcaactttggccagacctttgctgaccaactcctgaatgtcgttttcgctgtagccgatatttttcaaaatggcagccgtgtccataccatgactgggcattccgcgccagatttgtccggggttatttttgaatttcggcatgatgttcggccctttgcaggtgcgaccatccatcgtttgccactgagtgatactttcgcgagccacatactgtggattgctttccagttccggtacggtcagcactttggcgcaggcgatattcagttcagcaaagcgttcttttacttccgcgatggtatgtgtcgccagccaggcatcgagtttctcttcaaccagtgggccgtaagggcattcgatacggtggataagctgagtgccttccgggatttctggcgtgccaagcagatgtgcgaggccaatatctttaaagcactcttcaatttgggtaatgcccaccagttccatcacgatgtagccgtcggcacatttatacagaccgcaaccggcgtagtagggatctttacctttgctcatgcgcgggcacatttcgccgccgttgaagtaatccatcatgaagtactggcccatacgcagcatcacttcatacatggcgatgtcgatactttcgcctttaccggtttcacgcactttatgcagtgctgccagcgccgccgtggtggcggtcaggccagaaaagtaatcggcggtatacgggaaggcaggcattggctggtcaacatcaccgttctgaatcaggtaaccactaaaggcctgggcgatagtgttataggccggaagattggtgtactcctcggtgccgtactgaccaaaaccggacaggtgagcgataaccagtttcgggttgtgctgccacagtacttcatcggtaatgccacgacgggcaaaggccggacctttactggcttcgatgaagatatcggtggtttccattaatttcagaaacgcttcgcggccttcatctttgaaaatatttaagctcagcgcgtgcaaattgcggcgggagagttgcgggtagttcggttgaacgcgaatggtgtcggcccaggcgacgttctcgatccagataacttccgcgccccattctgcgaacatttgcccggcaaacggtccggcgatttcgataccggagaagacaacgcgcaatccggccaacggcccgaatttcggcatgggtagatgatccattatttgctcctgaaaaatttatgtagcgcatgactgccggatgcggcgtaaacgctttatccggcctacattcgtgctcccgtaggcctgataagacgcatcagcgtcgcatcaggcagcgcacggacttagcggtattgcttcagcaccgcacgacccagcgtcaggatctgcatttcgtcagatcccccggagacgcggtctacacgcagatcacgccagaagcggctgatgcggtggttgcccgcaatcccgacaccgcccagcacctgcattgcgctatccacaacttcaaatgccgcattggcgcagaagtatttgcacatcgctgcatcgccagaggtgatggtgccgttgtctgctttccacgctgcttcatacagcatgtttttcatggagtttaatttgatcgccatgtgggcgaatttttcctgaatcaactggaaacgaccaatagcctcgccaaactgcacgcgctgattggcgtagcgcgccgcatcttcaaaggcgcacatcgccgtaccgtagttggtgagggctaccaggaaacgttcatggtcgaactcttctttgacgcggttaaagccgttaccttcccgaccgaacatgtctttctcgtccagttccacgtcgtcaaaggtgatttcacagcagctatccatacgcagaccgagcttttcaagtttggtcactttgatgcccggtttgctcatatcaacaaaccattcggtgtagacaggtttgtccggagaagccccgtcgcgcgccatcaccacgatgtacggggtgtaggcgctgctggtaataaaacacttactaccattaagataaatcttaccatttctacgggtataagtcgttttcaggctacccacgtcggagcccgcgcccggttcggtaatcgcactgttccacatctgcttaccggtgccgcggaaagccataattttgtcgatctgctcttgtgtgccttcgcgcaggaaggtgttgaacccgcccggcaactggtacagcacataggttggtgcccccagacgtcccagctccatccacacggcggcgagagtaacaaaccccgcgtccagaccaccgtgctcttcagggatcagcagactgtcgatacccatatccgccagtgctttgacaaaacgttccgggtagacgctgtcacggtcgcactcggcaaaataggcctcccagttttcgctggccatcagttcgcggataccggcgacaaacagttcctgctcatcatttaaattaaaatccatctttcaacctcttgatattttgggggttaattaatctttccagttctgtttcgcgtctttaataaaggagagcgtcaccataatgttgacgaagaacagcgggcatcctccggcgataatggcggtttgaatcggtttcaggccgccgagcgccagcagaacaataccgataatgccaaccagaatactccaaccgatacgcaccagcagaggtggttcttcaccatcgcgtacttcgcggcaagtggacatcgccagggtataagagcaggcgttaaccagcgtaacggtggcaataaagcagaggatgaagaagccccacatggtggcggtgctgagtggcagagcggcccaggtttcaatgatggcgcgcgccacaccgtactgttcgatcagatttggaatgttgatgatgtttttatctatcaacagcagagtgttactaccgagtacagtccacaggatccaggtactcgctgtcagccccagcaccatgccgaagcacagttcacgcacagtacgaccacgggagatgcgggcgaggaagatactcatctggatagcataaatcacccaccatgcccagtagaacacggtccagccctgcgggaagccgcctttagcgatgggatcggtatagaacaacatgcgcggcagatacatcagcaacatccccacgctatcggtgaagtagttcatgatgaagctggcaccgctgacaatgaacacccaacccagcatcaggaagctcaggtaactacgcacgtcactggcgatacgtacccctttttgcagaccgcaagcgacgcaaatggcgttgaggataatccagcaggtaatgatgatagcgtccagttgcagggtatgcggaatgccaaacaaccattgcatacactcggtcaccagcggcgtggcaaggcccagactggtacccatcgcgaagatcaaggcgacgagatagaagttgtcgacgatagtgccgaacaaccctttggcgtgtttttcacctaccagcggcaccagtgtgctgctggggcgaatcacttccattttgcggacaaagaagaagtaagcgaaggcgacactaaggaagctgtaagtggcccacggcagaggtccccagtggaacaagctgtaagccagccccaactctttcgcccctgtgctgttcggttctaagccaaacggcggggtggagatgtagtagtagatctcaatgcttccccagaacagtacggcagcagacgtacaggaggcgaacatcataaagatccaactggcggtgctaaattctggcggttcgttacctaaacgctttttggcatacgggccaaacaccagccagaaccaaccgaaaagcatcaccaccatataccattcaaatgcccatccccatacattggtgacgtaactgaatacagcattaataacgacattcgctgcatccagatctctgactgtaagccaacaaagtatgccgacgattattaacggcggaaagaaaaccttcggttctattcccgtttttctcttttcattcttcatgagttaattccactgtgaaaacgaatatttattttgcgttcccgtttgttttatttttgttaacatttaatataattattattaacctcgtggacgcgttaatggctaactcataatgggtattcaataagctgtattctgtgattggtatcacatttttgtttcgggtgaatagagggcgttttttcgttaattttgattaataatcagtttgttatgctctgttgtgagtaaaaaataacatctgactttcaatattggtgatccataaaacaatattgaaaatttctttttgctacgccgtgttttcaatattggtgaggaacttaacaatattgaaagttggatttatctgcgtgtgacattttcaatattggtgattaaagttttatttcaaaattaaagggcgtgatatctgtaattaacaccaccgatatgaacgacgtttccttcatgatttctggagatgcaatgaagattattacttgctataagtgcgtgcctgatgaacaggatattgcggtcaataatgctgatggtagtttagacttcagcaaagccgatgccaaaataagccaatacgatctcaacgctattgaagcggcttgccagctaaagcaacaggcagcagaggcgcaggtgacagccttaagtgtgggcggtaaagccctgaccaacgccaaagggcgtaaagatgtgctaagccgcggcccggatgaactgattgtggtgattgatgaccagttcgagcaggcactgccgcaacaaacggcgagcgcactggctgcagccgcccagaaagcaggctttgatctgatcctctgtggcgatggttcttccgacctttatgcccagcaggttggtctgctggtgggcgaaatcctcaatattccggcagttaacggcgtcagcaaaattatctccctgacggcagataccctcaccgttgagcgcgaactggaagatgaaaccgaaaccttaagcattccgctgcctgcggttgttgctgtttccactgatatcaactccccacaaattcctagcatgaaagccattctcggcgcggcgaaaaagcccgtccaggtatggagcgcggcggatattggttttaacgcagaggcagcctggagtgaacaacaggttgccgcgccgaaacagcgcgaacgtcagcgcatcgtgattgaaggcgacggcgaagaacagatcgccgcatttgctgaaaatcttcgcaaagtcatttaattacaggggatgctatgaacacgttttctcaagtctgggtattcagcgataccccttctcgtctgccggaactgatgaacggtgcgcaggctttagctaatcaaatcaacacctttgtcctcaatgatgccgacggcgcacaggcaatccagctcggcgctaatcatgtctggaaattaaacggcaaaccggacgatcggatgatcgaagattacgccggtgtcatggctgacactattcgccagcacggcgcagacggcctggtgctgctgccaaacacccgtcgcggcaaattactggcggcaaaactgggttatcgccttaaagcggcggtgtctaacgatgccagcaccgtcagcgtacaggacggtaaagcgacagtgaaacacatggtttacggtggtctggcgattggcgaagaacgcattgccacgccgtatgcggtactgaccatcagcagcggcacgttcgatgcggctcagccagacgcgagtcgcactggcgaaacgcacaccgtggagtggcaggctccggctgtggcgattacccgcacggcaacccaggcgcgccagagcaacagcgtcgatctcgacaaagcccgtctggtggtcagcgtcggtcgcggtattggcagcaaagagaacattgcgctggcagaacagctttgcaaggcgataggtgcggagttggcctgttctcgtccggtggcggaaaacgaaaaatggatggagcacgaacgctatgtcggtatctccaacctgatgctgaaacctgaactgtacctggcggtggggatctccgggcagatccagcacatggttggcgctaacgcgagccaaaccattttcgccatcaataaagataaaaatgcgccgatcttccagtacgcggattacggcattgttggcgacgccgtgaagatccttccggcgctgaccgcagctttagcgcgttgatccactctggcagggctgcattttggccctgccgctgacagggagctcttatgtccgaagatatctttgacgccatcatcgtcggtgcagggcttgccggtagcgttgccgcactggtgctcgcccgcgaaggtgcgcaagtgttagttatcgagcgtggcaattccgcaggtgccaagaacgtcaccggcgggcgtctctatgcccacagtctggaacacattattcctggtttcgccgactccgcccccgtagaacgcctgatcacccatgaaaaactcgcgtttatgacggaaaagagtgcgatgactatggactactgcaatggtgacgaaaccagcccatcccagcgttcttactccgttttgcgcagtaaatttgatgcctggctgatggagcaggccgaagaagcgggcgcgcagttaattaccgggatccgcgtcgataacctcgtacagcgcgatggcaaagtcgtcggtgtagaagccgatggcgatgtgattgaagcgaaaacggtgatccttgctgatggggtgaactccatccttgccgaaaaattggggatggcaaaacgcgtcaaaccgacggatgtggcggttggcgtgaaggaactgatcgagttaccgaagagcgttattgaagaccgttttcagttgcagggtaatcagggggcggcttgcctgtttgcgggaagtcccaccgatggcctgatgggcggcggcttcctttataccaatgaaaacaccctgagcctggggctggtttgtggtttgcatcatctgcatgacgcgaaaaaaagcgtgccgcaaatgctggaagatttcaaacagcatccggccgttgcaccgctgatcgcgggcggcaagctggtggaatattccgctcacgtagtgccggaagcaggcatcaacatgctgccggagttggttggtgacggcgtattgattgccggtgatgccgccggaatgtgtatgaacctcggttttaccattcgcggtatggatctggcgattgccgccggggaagccgcagcaaaaaccgtgcttagtgcgatgaaaagcgacgatttcagtaagcaaaaactggcggaatatcgtcagcatcttgagagtggtccgctgcgcgatatgcgtatgtaccagaaactaccggcgttccttgataacccacgcatgtttagcggctacccggagctggcggtgggtgtggcgcgtgacctgttcaccattgatggcagcgcgccggaactgatgcgcaagaaaatcctccgccacggcaagaaagtgggcttcatcaatctaatcaaggatggcatgaaaggagtgaccgttttatgacttctcccgtcaatgtggacgtcaaactgggcgtcaataaattcaatgtcgatgaagagcatccgcacattgttgtgaaggccgatgctgataaacaggcgctggagctgctggtgaaagcgtgccccgcaggtctgtacaagaagcaggatgacggcagtgtgcgcttcgattacgccggatgtctggagtgcggcacctgtcgcattctggggctggggagcgcgctggaacagtgggaatacccgcgcggcacctttggtgtggagttccgttacggctgatgttggtttgatacgtaacgccgcactgactctcattgcaaaaaacaggaataaccatgcaaccgtccagaaactttgacgatctcaaattctcctctattcaccgccgcattttgctgtggggaagcggtggtccgtttctggatggttatgtactggtaatgattggcgtggcgctggagcaactgacgccggcgctgaaactggacgctgactggattggcttgctgggcgcgggaacgctcgccgggctgttcgttggcacaagcctgtttggttatatttccgataaagtcggacggcgcaaaatgttcctcattgatatcatcgccatcggcgtgataagcgtggcgacgatgtttgttagttcccccgtcgaactgttggtgatgcgggtacttatcggcattgtcatcggtgcagattatcccatcgccaccagtatgatcaccgagttctccagtacccgtcagcgggcgttttccatcagctttattgccgcgatgtggtatgtcggcgcgacctgtgccgatctggtcggctactggctttatgatgtggaaggcggctggcgctggatgctgggtagcgcggcgatcccctgtttgttgattttgattggtcgattcgaactgcctgaatctccccgctggttattacgcaaagggcgagtaaaagagtgcgaagagatgatgatcaaactgtttggcgaaccggtggctttcgatgaagagcagccgcagcaaacccgttttcgcgatctgtttaatcgccgccattttccttttgttctgtttgttgccgccatctggacctgccaggtgatcccaatgttcgccatttacacctttggcccgcaaatcgttggtttgttgggattgggggttggcaaaaacgcggcactagggaatgtggtgattagcctgttctttatgctcggctgtattccgccgatgctgtggttaaacactgccggacggcgtccattgttgattggcagctttgccatgatgacgctggcgctggcggttttggggctaatcccggatatggggatctggctggtagtgatggcctttgcggtgtatgcctttttctctggcgggccgggtaatttgcagtggctctatcctaatgaactcttcccgacagatatccgcgcctctgccgtgggcgtgattatgtccttaagtcgtattggcaccattgttagcacctgggcactaccgatctttatcaataattacggtatcagtaacacgatgctaatgggggcgggtatcagcctgtttggcttgttgatttccgtagcgtttgccccggagactcgagggatgagtctggcgcagaccagcaatatgacgatccgcgggcagagaatggggtaaattgttcagatttctctcttttctgaatcaatattattgactataagccgcgtgaatatatgactacactttgtgggaaaacaaaggcgtaatcacgcgggctacctatgattcttataatttatgcgcatccgtatccgcatcattcccatgcgaataaacggatgcttgaacaggcaaggacgctggaaggcgtcgaaattcgctctctttatcaactctatcctgacttcaatatcgatattgccgccgagcaggaggcgctgtctcgcgccgatctgatcgtctggcagcatccgatgcagtggtacagcattcctccgctcctcaaactttggatcgataaagttttctcccacggctgggcttacggtcatggcggcacggcgctgcatggcaaacatttgctgtgggcggtgacgaccggcggcggggaaagccattttgaaattggtgcgcatccgggctttgatgtgctgagccagccgctacaggcgacggcaatctactgcgggctgaactggctgccaccgtttgccatgcactgcacctttatttgtgacgacgaaaccctcgaagggcaggcgcgtcactataagcaacgtctgctggaatggcaggaggcccatcatggataattaaggaatggcaggaggcccatcatggatagccatacgctgattcaggcgctgatttatctcggtagcgcagcgctgattgtacccattgcggtacgtcttggtctgggaagcgtacttggctacctgatcgccggctgcattattggcccgtgggggctgcgactggtgaccgatgccgaatctattctgcactttgccgagattggggtggtgctgatgctgtttattatcggcctcgaactcgatccacaaaggctgtggaagctgcgtgcggcagtgttcggctgtggcgcattgcagatggtgatttgcggcggcctgctggggctgttctgcatgttacttgggctgcgctggcaggtcgcggaattgatcggcatgacgctggcgctctcctctacggcgattgccatgcaggcgatgaatgaacgcaatctgatggtgacgcaaatgggtcgcagtgcctttgcggtgctgctgttccaggatatcgcggcgatcccgctggtggcgatgattccgctactggcaacgagcagtgccagcacgacgatgggcgcatttgctctcagcgcgttaaaagtggcgggtgcgctggtgctggtggtattgctggggcgctatgtcacgcgtccggcgctgcgttttgtagcccgctctggcttgcgggaagtgtttagtgccgtggcgttattcctcgtgtttggctttggtttgctgctggaagaggtcggcttgagcatggcgatgggcgcgtttctggcgggcgtactgctggcaagcagcgaataccgtcatgcgctggagagcgatatcgaaccatttaaaggtttgctgttggggctgtttttcatcggtgttggcatgagcatagactttggcacgctgcttgaaaacccattgcgcattgtcattttgctgctcggtttcctcatcatcaaaatcgccatgctgtggctgattgcccgaccgttgcaagtgccaaataaacagcgtcgttggtttgcggtgttgttagggcagggcagtgagtttgcctttgtggtatttggcgcggcgcagatggcgaatgtgctggagccggagtgggcgaaaagcctgaccctggcggtggcgctgagcatggcagcaacgccgattctgctggtgatcctcaatcgccttgagcaatcttctactgaggaagcgcgtgaagccgatgagatcgacgaagaacagccgcgcgtgattatcgccggattcggtcgttttgggcagattaccggacgtttactgctctccagcggggtgaaaatggtggtactcgatcacgatccggaccatatcgaaaccttgcgtaaatttggtatgaaagtgttttatggcgatgccacgcggatggatttactggaatctgccggagcggcgaaagcggaagtgctgattaacgccatcgacgatccgcaaaccaacctgcaactgacagagatggtgaaagaacatttcccgcatttgcagattattgcccgcgcccgcgatgtcgaccactacattcgtttgcgtcaggcaggcgttgaaaagccggagcgtgaaaccttcgaaggtgcgctgaaaaccgggcgtctggcactggaaagtttaggtctggggccgtatgaagcgcgagaacgtgccgatgtgttccgccgctttaatattcagatggtggaagagatggcaatggttgagaacgacaccaaagcccgcgcggcggtctataaacgcaccagcgcgatgttaagtgagatcattaccgaggaccgcgaacatctgagtttaattcaacgacatggctggcagggaaccgaagaaggtaaacataccggcaacatggcggatgaaccggaaacgaaacccagttcctaataaagagtgacgtaaatcacactttacagctaactgtttgtttttgtttcattgtaatgcggcgagtccagggagagagcgtggactcgccagcagaatataaaattttcctcaacatcatcctcgcaccagtcgacgacggtttacgctttacgtatagtggcgacaattttttttatcgggaaatctcaatgatcagtctgattgcggcgttagcggtagatcgcgttatcggcatggaaaacgccatgccgtggaacctgcctgccgatctcgcctggtttaaacgcaacaccttaaataaacccgtgattatgggccgccatacctgggaaagtatcggtcgtccgttgccaggacgcaaaaatattatcctcagcagtcaaccgggtacggacgatcgcgtaacgtgggtgaagagcgtggatgaagccatcgcggcgtgtggtgacgtaccagaaatcatggtgattggcggcggtcgcgtttatgaacagttcttgccaaaagcgcaaaaactgtatctgacgcatatcgacgcagaagtggaaggcgacacccatttcccggattacgagccggatgactgggaaagcgtattcagcgaattccacgatgctgatgcgcagaactctcacagctattgctttgagattctggagcggcggtaattttgtatagaatttacggctagcgccggatgcgacgccggtcgcgtcttatccggccttcctatatcaggctgtgtttaagacgccgccgcttcgcccaaatccttatgccggttgctcggctggacaaaatactgtttatcttcccagcgcaggcaggttaatgtaccaccccagcagcagccggtatccagcgcgtatataccttccggcgtacctttgccctccaggcttgcccagtgaccaaaggcgatgctgtattcttcagcgacagggccaggaatcgcaaaccacggtttcagtggggcaggggcctcttccgggctttctttgctgtacatatccagttgaccgttcgggaagcaaaaacgcatacgggtaaaagcgttggtgataaaacgcagtcttcccagcccccgcaattccggactccagttatttggcatatcgccgtacatggcatcaagaaagaagggataggagtcactgcttagcaccgcttctacatcgcgtgcgcactctttggcggtctgcagatcccactgcggcgtgatccctgcgtgggccatcaccagctttttctcttcgtcgatttgcagcagaggctggcgccgcagccagttaagcagctcgtcggcatccggcgcttccagcagcggtgtcaggcgatctttcggtttattgcggctgatcccggcaaataccgccagcagatgcagatcgtgattgcccagcaccagacgtacgctgtcgcctaaggatttcacatagcgcagaacatccaggctacccggcccgcgcgcgaccagatcgcccgtcagccagagggtatctttcccaggggtaaattctactttatgcagcaatgcgatcagttcatcgtaacaaccatgaacgtcgccaataaggtatgtcgccatattcttttaatgaatgagtgtgggaacggcgagtcggaatacgggaatgtcgatgctgaaagggacgccattttcatcgatcatttcgtagtgaccctgcatggtgcccagcggggtttcaatgattgcaccgctggtgtactggtactcttcgccaggcgcgataagtggctggacgccaaccactccttcgccctggacttcggtttcacggccattgccattggtgatcagccagtaacgccccaacaactgcactggcgctcgccccagattgcgtatggttacggtataagcaaaaacgtaacgttcattatcaggactagattgagcctcaatgtagacgctttgaacctgaatacacactcgggggctattgatcatcgttaactctcctgcaaaggcgcgttctccgccagatagttcgccatctggcaatattgcgcgacagagatattttccgctcgcatcgccgggtcgatccccattcccgttaacacctcgacgctaaacaggttgccgaggctgttacgaatggttttacgacgctggttaaaggcttcggtggtgatgcggctcaacacacgaacatctttaaccgggtgaggcatcgttgcatgaggaaccaggcgcacgacggcggaatccactttgggtggtggtgtaaaggcactcggcggtacttccagtaccgggatcacattgcaatagtattgcgccatgacgcttaatcgaccatacgctttgctgttcggtcctgcaaccagacgattcaccacctctttttgcaacataaagtgcatgtcggcaatggcatcagtatagctaaacagatggaacatcaacggcgtggagatgttataaggcaggttgccgaaaacacgcagcggctgacccattttctcggccagttcaccaaagttaaaggtcatcgcatcctgctgataaatcgtcagtttcgggcctaagaatggatgcgtttgcagacgtgccgccagatcgcggtcaagttcgatgaccgtcagctggtccagacgttcgccgaccggttcggtcaatgccgccagaccggggccgatttcgaccatcgcctggcccttttgcgggttaatggcagacacaatactgtcgatcacgaactgatcgttgagaaagttttgcccgaagcgtttacgggctaagtggccctggtggactcgattattcattgggtgttaacaatcattttgatggcgagattaagcgccgtaataaaactgccggcatcggctttgccacgtcccgccagttcaagcgcggtgccgtggtccacacttgtgcgaataaagggcaggcccagcgtaatgttcacaccgcgcccgaagccctggtattttagcacgggaagaccctgatcgtggtacatcgccagcacggcgtcggcgttatcaagatatttcggctgaaacagggtatcggcaggcagcggcccgttgagtttcatcccctgcgcccgcagctcattgagcaccggaataatggtgtctatctcttccgtacccatatgaccgccttcgcccgcgtgcggattcagcccgcagaccagaatgcgcggttcggcaataccaaatttggtccgcaaatcgtgatgcaaaatagcaatcacttcgtgcaaaagtgcaggggtgatagcgtctgcgatatcgcgcagcggtaaatgcgtcgttgccagcgccacgcgaagttcttcggtcgccagcatcatcaccacctttttcgcctggctacgctcttcgaaaaactcggtatgaccggtaaaaggaatgccagcgtcgttaataacgcctttatgcaccggacctgtgatcagcgcggcaaattcgccgttcagacaaccatcgcacgctcgcgccagcgtttccaccacataatgcccattttcaaccgctaactgccccgcagtgacaggtgcacgtagcgcgacaggaagtagcgttaatgtgcccgcagtttgcggttgtgcaggggagttgggggaataagggcggagggtgagcggcaaaccgagcatcgctgcccggttggtaaggagagtggcatcggcacaaacaaccagttcgaccggccactcacgctgtgcaagctggacaactaagtccgggccaatcccggcgggctcgccgggagtgatcacaacacgttgggttttaaccattagttgctcaggattttaacgtaggcgctggcacgttgttcctgcatccagcttgctgcttcttcgctgaacttacggttcatcagcatgcggtatgcacgatctttctgcgcagcgtcggttttatcgacattacgggtatccagcagttcgattaaatgccagccgaaactagagtgaaccggtgcactcatttgacctttgttcaggcgagtcagggcgtcacggaaggccggatcgaaaatatctggtgtagcccagccgagatcgccgccctggttagcagagcctggatcctgagagaactctttcgctgcggcagcaaaagtcgttttaccactcttgatatcagcagcaatctgttccagtttcacacgggcctgttcgtcagtcatgatcgggctcggtttcagcagaatatggcgagcatgaacttcggtcacgctgatatttttgctttcgccgcgcaggtcgttaactttcagaatatggaagccaacgccggaacgaatcgggccaacaatgtcgcctttcttcgcggtgcttaatgcctgggcgaagatcccgggcaactcctgaatacggccccagcccatctggccgccgttcagcgcctgctggtcggcagaatgagcaatcgccagcttaccgaaatcagcgccgttacgcgcctgatcgacaatggcgcgcgcctggctttccgcttcgttcacctgatcagaggtcgggttttccggcagcgggatcaggatgtggctcaggttcagctcagtgctggcgtcgttttggttacccacctgctgcgccagggattcgacttcctgcggcaggatggtgatgcgacgacgcacctcgttgttacgcacttcagagataatcatctctttgcggatctggttacgataggtgttgtagttcagtccatcgtaagccagacggctgcgcatctgatccagcgtcatgttgttctgtttcgcgatgttagcaatcgcctgatccagctgctcatcggagattttcactcccattttctgccccatctgcaggatgatttgatccatgatcaaacgttccatgatttggtggcgcagcgtcgcgtcatcaggaagttgctgccttgcctgagcagcgttcagttttacgctctgcattaatccatcaacgtcgctttccagcacgacgccgttattgacgacggctgcgactttatcgactacctggggggcagcgaaactggtattcgcgatcatggcgataccgagaagcagcgttttccagttcttcatactttttccatttcaattaaccgcactgcggattacgtggtaaatcaacaaatcacaaagtgttttgatacggcagaatgttgctacgcagcatctcttgcgtacccagaccgtagttggagctcaggccgcgaagttcgatgttaaagccgattgcgttgtcatataccgcatgttgtttatcgttatcccaaccgttcagcttccgctcgtaaccgacgcgaattgcatagcagcaggagctgtattgcacacctaacatagagtcggcttgcttgttagcattggtgtcgtagtagtaggccccaacaatggaccaacgatcggcaattggccagctggcgacagcacctacctggctaataccattcttatattgctcagcagtggaatagtacttaggcagcgtagcctgaatatattccgggctggcgtaacggtaattcagctgtaccagacggtcttcatcccgacggtattcaatgctggagttactggtcgctacgttatccagacgtgtatcgtactgaatcccgccacgcaatccccaacgctcggagatacgccagtaagtatcgcctgcccacaccagactacccgttttgtcgtcattctcccatgttatgttgtcatcgccagtgcgagactccgtgaaatagtagatttgaccaacggaaatattaaaacgttcaacggcagcatcatcatatatgcgagatgtgacaccggtcgtcacctggttagcggaggcaatacggtcaagaccgccgtaagtccggtcccggaacaggccagagtagtcagattgcagcagagagctgtcgtagttatagatgtcgctctgatcgcgatacggcacgtacaaatactgcgcgcgcggttccagcgtttgggtataacccggagccagcatttccatatcgcgttcaaagaccattttgccgtcaactttgaattgcggcattacgcggttaacggattcgtccagcttggtcgtgtttctggagttataccagtcaagattggtttgctgataatgggttgccagcaacttcgcttcggtattgatgctgccccagttattagagagcggcaaattgatggtcggttccaggtgaacacgggttgcttcaggcatgtcgtctctggtgttaacaaagtgcactgcctggccgtaaatacgcgtatcaaacggaccaacatcattctggtagtaattaacgtctaactgcggctctgcgctgtagctactggtgttctgttcgctgaaaacctggaactgcttggtactaacggtggcattgaagttttgcaccgcatagccaacgctgaatttttgcgttgcgtagccgtcagtactggaaccgtacttgttatcgaaatcattgaagtagctaggatcgctgaccttggtgtagtcgacgttgaaacgccacacctgatccatgaccccggagtggttccagtagaataaccaacgacgactactgtcatcgttcgggtgttcatcttcatagactttatcactaggcagatagtccagttccatcaagccagcgcccgcctgggagaggtagcggaattcgttctcccacatgatgttgccacgacgatgcatataatgcggcgtgatggtggcatccatatttggcgcgatgttccagtaatatggcaggtagaactcaaagtagttggtggtggtgtacttggcgttcgggatcaagaaaccagagcgacgtttgtcacccaccggcaactgcaaataggggctataaaagatcggtaccggacccaccttaaagcgggcgttccagatctccgcaacttgttcttcgcggtcatgaataatttcgctacctaccacgctccaggtgtcagaacccggcagacaggaggtaaagctaccgttatccagaatggtatagcggttttcgccacgttgtttcatcaggtccgctttaccgcgaccctggcgacccaccatctggtaatcaccttcccagacgttggtatctttggtgttcagattcgcccagcctttcggccctttgaggatcacctggttatcgtcgtaatggacattaccgagcgcatcaacggtacgtaccggctccggttgtcctggtgcctctttttgatggagctgcacttcgtcggcctgcagacggctgttaccctgcatgatatccacgctgccagtaaacacggcgtcatccgggtagtcccctttcgcgtggtcagcattgatagtcacgggtaagtcattggtatcgccctgtaccagaggacggtcatagcttggcacgcccaacatgcactgactggcgaggtcggctgccagtccctgttgactataaagggcggtggcaatcatggtggccaggagagtggggatacgttttttcatacgttgattttattgttccatcatcggtaacgttgcgcgtgacaaacggtcagagactaacgtactcgtcatctctacgctagtgttaatcctgtccgaatagcgtcagtggtgttaggcacggcattgaatgacaggtatgataatgcaaattataggcgatgtcccacaattgaccgcagccggaaaacggtaaaagcacctttatattgtgggagatagccctgatatccgtgtgtcgatttggggaatatatgcagtattggggaaaaatcattggcgtggccgtggccttactgatgggcggcggcttttggggcgtagtgttaggcctgttaattggccatatgtttgataaagcccgtagccgtaaaatggcgtggttcgccaaccagcgtgagcgtcaggcgctgttttttgccaccacttttgaagtgatggggcatttaaccaaatccaaaggtcgcgtcacggaggctgatattcatatcgccagccagttgatggaccgaatgaatcttcatggcgcttcccgtactgcggcgcaaaatgcgttccgggtgggaaaaagtgacaattacccgctgcgcgaaaagatgcgccagtttcgcagtgtctgctttggtcgttttgacttaattcgtatgtttctggagatccagattcaggcggcgtttgctgatggtagtctgcacccgaatgaacgggcggtgctgtatgtcattgcagaagaattagggatctcccgcgctcagtttgaccagtttttgcgcatgatgcagggcggtgcacagtttggcggcggttatcagcagcaaactggcggtggtaactggcagcaagcgcagcgtggcccaacgctggaagatgcctgtaatgtgctgggcgtgaagccgacggatgatgcgaccaccatcaaacgtgcctaccgtaagctgatgagtgaacaccatcccgataagctggtggcgaaaggtttgccgcctgagatgatggagatggcgaagcagaaagcgcaggaaattcagcaggcatatgagctgataaagcagcagaaagggtttaaatgaccctgtaaatgatgctgagtaactgcccacgattaaaggtggccgccctggcggtcacttctttgagaaaaggcgtttactcagaatggtggacaggctcaatgcacgatttacgggaggggttctgtaggttttatcgcgttgaccctgcttaaggttgagagctttacgacgagcggaattatatttttacgtcttaaaaataaaaaacacatacctgaatgagcgatttttgaaagtatatttattcagaacgcgcatcatgagtttttaactcaatgcgaggctattaccatgaaagtaagtgttccaggcatgccggttacacttttaaatatgagcaagaacgatatttataagatggtgagcggggacaagatggacgtgaagatgaatatctttcaacgcttgtgggagacgttacgccatctgttctggagtgataaacagactgaggcttataaacttctgttcaatttcgtgaataaccagactggcaacatcaacgccagtgaatactttactggggctatcaacgagaatgagagagaaaagtttatcaatagcctggaattattcaataaacttaaaacatgcgcaaaaaatccggatgagttggtcgcaaagggcaatatgcgctgggtcgcccagaccttcggggatatcgagttaagtgtcacttttttcattgaaaagaataagatatgtactcagacgttgcagctgcataagggccaaggtaacttgggcgttgatcttagaaaggcttaccttcccggcgttgacatgagggattgttaccttggtaaaaaaacaatgaaaggtagcaatgatatcctttatgagagacctgggtggaatgctaacctgggcgtgctaccccggacggtgctaccccggacggtgctaacccggacggtgctaacctggacggtgctaccgtgaacggtgctacctccttatatgatgaggtaattattattaataaaatcccccccaaaaaaattgatactaaaggagttgctactgaagaagttgctactaaaaaagtactgctgaacaaattactgacaacgcaattattgaatgagccagaataagctaaggttgaaggggctggaacgccccttcaaccttagcagtagcgtgggatgatttcacaattagaaagacctgcatgatgagctagagaagaggctagtgacgcaaggcgtcgtgcaggacacggatcaccgagatgggcatcgccaaccagactgctaattagcccatgaataacaatcagaaaggaccataacagacccgttaaaatgaaatataagagacggtcaacgggtgaagaaaaagttcaaaaattcgctgtggagcaggaagggaattaccgaatggaaagcgtagccacacgcaacaactgaaagcagtttggcagaaacaaaaaatccccggactcggggatttatgtacaagaggcagcccttaggatgagggtataaacgtacaggaaaggttaaaaatccgctggcgctttaaacgtcatactattgccatacgccggatgggtaatcgtcaacatctctgcatgtagcaacaaacgtggtgccatcgctctcgcttctggacttgcataaaaacgatcgccgagaatcggatgacccagcgccagcatatgcacacgcaattgatggctacgcccggtaatcggttttaacaccactcttgccgtgttatccgccgcatactccaccacttcatattccgtctgcgcaggtttacccgtttcgtaacagactttctgtttcgggcggtttggccagtcgcaaatcagcggcagatccaccagaccttctgcgggggatggatgcccccagacgcgggccacatactgctttttcggctcgcgctcgcggaactggcgttttaactcccgctccgcggctttggtcagcgccactacaatcacgccgctggtagccatatccagacgatgcacgctttctgcctgcggataatcacgctgaatgcgcgtcatcacgctgtctttgtgctcttccagacgacccggcacactcaacaaaccgctcggcttgttgaccaccataatatggtcatcctgatacaggataaccaaccagggttcctgcggtggattgtagttttccatccccattttcggctccgttactgatgcgttacaacgatcaaacgcagggcatccagacgccaacctgcctgatccaggctttccattacctgctgacggttgctctcaatggcggtcagttcgtcgtcacgaatgttcgggttcactgcacgcagagcttccagacgagacagctcggcagacagtttttcgtcggcttcgttacgcgctgcatcaatcaatgcacgggcagatttctcgatctgcgcttcacccagttgaaggatagcgtgaacatcctgctgcacggcgttaaccagtttgctgccggtgtgacggttaaccgcgttaagctggcggttaaaggtttcaaactctacctgcgccgccaggttgttgccgtttttatccagcagcatacgtaccggcgtcggtggcaggaagcggttgagctgcaactgcttcggagcctgggcttcaaccacataaatcagttccaccaacagcgtacctaccggcaacgctttgttttttaacagactaatcgtgctgctaccggtatcgccagaaaggatcagatccagaccgttgcggatcagcggatgctcccaggtaataaactgtgcatcttcacgcgccagcgccacttcacgatcaaaggtgatggtgatgccatcttcgctcaggccagggaagtccggcaccagcatatgatcggacggcgtcagcacgatcatgttgtcgccgcgatcgtcctgattgataccgataatatcgaacaggttcatggcgaaggcgatcaggttggtatcgtcatcctgctcttcaatgctttctgccagtgcctgggctttttcgccaccgttggagtggatttccagcaggcggtcacgaccctgttccagctgtgctttcagcgcttcatgttgctcgcggcagtttttgatcagatcgtcaaagccttcggtttgatccggactagccagatagttaatcagatcgttgtatacgctatcgtaaatagtgcgtccggtcgggcaggtgtgctcaaatgcatccagaccttcgtgataccagcgcaccagcacgctctgagcggttttctccagataaggcacatggatctgaatatcgtgcgcctggccgatacgatccagacgaccaatacgctgctccagtagatccgggttgaatggcaggtcaaacatcaccatgtggctggcgaactggaagttacgtccttcagaaccgatttcactgcacagcagtacctgtgcgccggtgtcttcttcggcaaaccaggcggcagcgcggtcacgttcgataatgctcataccttcgtggaacaccgcagcgcgaataccttcacgttcgcgcagtacctgctccagttgcagcgcagtggcagctttggcgcagatcaccagcactttctgagagcgatggctggtcaggtagcccatcagccactcaacgcgcggatcgaagttccaccaggtggcgttatcaccttcaaattcctgataaatacgctccgggtagagcatatcgcgagcacgatcttccgcacttttacgtgcgcccataatgccggagactttaatagccgtctgatactgcgtcggtagcggcagcttaatggtgtgcagctcgcgtttcgggaatcctttcacaccgttacgcgtgttacggaacagcacgcggctggtgccgtggcgatccatcagcatgctaaccagctcctgacgggcgctctgggcatcttcgctgtcgctgtttgctgcctgcaacagcggctcgatatcctgctcgccgatcatctcgccgagcatgttcagttcgtcattgctcagtttgttacctgccagcagcatggcaacggcgtccgcaaccggacgataatttttctgctcttcaacgaactgcgcaaaatcgtggaaacggttcgggtccagcagacgcagacgggcgaagtggctttccatccccagctgttccggggtcgcggtcagcagcagaacgcccggcacgtgctctgccagttgttcaatggcctgatattcacggcttggcgcatcttcgctccacaccaggtgatgcgcttcatcgaccaccagcaggtcccattcggcttcacagagatgttccaggcgctgtttgctacgacgggcaaaatccaggctgcaaatcaccagctgttcggtgtcaaacgggttgtaagcatcgtgctgagcttcggcataacgctcatcatcaaatagcgcaaagcgcaggttgaaacggcgcagcatttctaccagccactgatgctgtaaggtttccgggacgataattagcacacgttcagcagcgccagagagcagttgctgatgcaggatcatcccggcttcaatggttttccctaaacccacttcgtcagccagcaggacgcgcggcgcgtggcggcgaccaacatcatgagcgatgttgagctgatgcgggatcaggctggtacgctgaccgcgcaggccgctgtacggcatacggaactgttcgctggaatatttacgcgcgcgataacgcagcgcaaagcggtccatacggtcaatctgcccggcaaacagacggtcctgcggtttgctgaacaccagtttgctatcaaggaaaacttcacgcagggctacgccggactcttcagtatccaggcgagtaccgatataggtcagcaagccattttcttcttttacttcttcgacttgcatctgccagccgtcatggctggtaatggtatcaccagggttgaacatcacgcgggtcacgggggaatcactgcgtgcgtacagacggttttcaccagtagatgggaaaagtaaagtgacagttcgcgcatccaccgcgacaacggttccaagtcccaattcgctttctgtatcgctgatccagcgttgaccaagtgtaaaaggcatatgtgttcggctctatatctttaattgcaggcaataaccacccgctaccgtgcttatgaggtagtggtgttattcaggtccaggaatggaaagggcgctatggtactggatggcaaagcattcgtcacgcatcaaaatggtatctggcgaactcttttttttgctcaaaatagcccaagttgcccggtcataagtgtagcaaaattatcctcaataaaagggagtattccctccgccacgggttgtagctggcgggtcagatagtgttcgtaatccagtggactacgttggtagtccagcggctccgggccgttggtggtccatacgtacttaatggtgccgcgattctgatattgcaaggggcgaccacgcttttggttttcttcatcggcaaggcgagcggcgcgtacatgaggcggcacattacgctgatactcgctcagcggacggcgaaggcgtttacggtaaaccagtcgcgcatccagttcacccgccatcagtttgtcgatggtttcgcgtacatattcctgatatggctcgttgcggaagatgcgcaggtatagctcctgctgaaactgctgggccagcggcgtccagtcggtgcgcacggtttccagccctttaaacaccatccgctgcttgtcgccctcctgaatcagtccggcataacgctttttactgccggtatcggctccgcgaatggttggcatcagaaaacggcagaaatgggtttcatactccagttctaatgcgctggtcagccgttgtttttgcagcgtttccgcccaccaggcgttaacgtgctgcaccagtgcacgaccgattttcgccgcttcttcttcgctatgtgcgcctttcagccagacaaacgtactgtcggtatcgccgtagataacgtcgtagccctgtgcttcaatcaacgctttggtttgccgcatgatctgatgaccacgcatggtgatgctgcttgccagccgcggatcgaagaagcggcaggcggtggtgccgagcacgccataaaaggcattcatgatgattttcagcgcctggctcagcggtttgttaccctggcgtttggcttcatcgcgcccgtgccagatgttagtcacaatctccggcaggcaatgtttttctcggctgaaccaggcatcgagaaaaccttcggtactgtgctctggatcaggctgcgccatgccttccaccagcccgacgggatcaatcagaaaggtgcggatgatgctcgggtacaggcttttatagtccagcaccagcacactatcataaagccctggccgactatccatcacgtagccgccagggctggcgtgcggcggcacttcgccgagattaggcgcgacataaccagcgcgatgcattcgcggaaaatagagatgaccaaatgccgccacgctaccgccgtgtcggtccaccggcaggccgttcaccgttgcccgttcgagtaaaaatggcatgatttcagttttgtggaagatctgcgtcaccagctcgcaatctttcaggttataagttgccagcgcaggtttatcttcggcgaaacggcggtcaatttcgtccattcgatcccacgggttatcgatagattttccttcgcctaatagctcctgagcgacagtttccaggctgaaactagagaaattccagaacgcggatttcagcgcctcgataccgtcgataattagccgacctttagcctgggcaaaaaagacgccgtttttaaagccgtgctcgcgccactccagctcgctattatcgcgcccaagacgcagcggaagacggtaacgctcggcatgtttttgcagcattcgcagatcgaactgcaccacgttccaaccgatgatcacatcaggatcgtagttggcaaaccaggcgttgagtttttccagcaactgcgggcggctggcgacgtattccagttcgaaatcaaggctggaggcgtcgccattctccggccccagcatataaacgatgcgctgcccgcagccttccaggccgatgcagtacagctcaccgtggcgggtggtttcaatatctatagaaacccacttgagcggcggacgatagtcgggatgcggtttcagacgggcattaacgatagtgccattgtgcatatcaccctcgacccacaccggactggtgataaaccgctccatcagatagcgttctggcggacgcacatcggcctcgtagacggtaacgccaccttcacgcaggcgcttttcgtaattcatcaattggcgatgggcgcgacagtaaaggccatacaccggctggcggtgaaaatcctttaacgccagcggtgtcaggcgaaagccttgttcaccctgcaaaatatgctgagcgcggggaacctgatcggcgggaataaacgccacggactcttgcggtgcaagcgtaacctgcaacggcccgttgtccgtcgccagccagaaggagacttctgtcccttgcggggtgtcccgccagtgtcgggttaagataaaacctgcctgcgccacgctgaaaatccatcaaaaaaccaggcttgagtatagcctggtttcgtttgattggctgtggttttatacagtcattactgcccgtaatatgccttcgcgccatgcttacgcagatagtgtttatccagcagcgtttgctgcatatccggtaactgcggcgctaactgacggcagaatatccccatataagcgacctcttccagcacgatggcgttatgcaccgcatcttcggcatttttgccccatgcaaacgggccgtgggaatggaccagaacgccgggcatttgcgctgcatcgataccctgtttttcaaaggtttctacgatgacgttaccggtttcccactcatattcgccgttgatttctgcgtcggtcattttgcgggtgcagggaatggtgccgtagaaatagtcggcgtgggtggtgccggttgctggaatgctctgacccgcctgcgcccagatggtggcgtggcggctgtgcgtatgcacaatgccgccaatggaggggaatgcctgatagagcagccggtgagttggcgtgtcggaggagggctttttcgtaccttcaaccacttcaccggtttcgatgctaaccacgaccatatcgtcagcggtcatgacgctgtaatcgacgccggaaggtttgatcacaaagacgccgcgctcgcgatcaacggcgctgacgttgccccatgtgagcgtgaccaggttgtgttttggcagcgccaggttggcttctaatacctggcgtttgagatcttctaacatgttgactccttcgtgccggatgcgctttgcttatccggcctacaaaatcgcagcgtgtaggcctgataagacgcgccagcgtcgcatcaggcgttgaatgccggatgcgctttgcttatccggcctacaaaatcgcagcgcgtaggcctgataagacgcgccagcgtcgcatcaggcgttgaatgccggatgcgctttgcttatccggcctacaaaatcgcagcgtgtaggccagataagacgcgtcagcgtcgcatcaggcgttacataccggatgcggctacttagcgacgaaacccgtaatacacttcgttccagcgcagcgcgtctttaaacgctggcaggcgtgtgtcgttatcaatcaccgtgatttcaatgtcgtgcatctcggcgaattggcgcatatcgttgaggttcagtgcatggctgaagacggtatggtgcgcgccaccagcgaggatccacgcttcggaagcagttggcagatccggttgcgctttccacagcgcattcgccaccggcagtttcggcagggagtgcggtgttttcaccgtgtcgatgcagttaaccagtagacggtaacgatcgccgagatcaatcaagctggcgacaatcgctgggccggtttgggtattgaagatcaggcgggcaggatcgtccttaccaccaataccgagatgctgaacgtcgaggatcggtttctcttctgcggcgatgctcgggcagacttccagcatatgggagccgagcaccaggtcattacctttctcgaagtgataggtgtagtcctccataaaggaggtgccgccctgcagaccggtactcatcaccttcatgatgcgaagcagggcggcagttttccagtcgccttcgcccgcaaagccgtaaccctgctgcatcagacgctgtacggccagaccaggaagctgtttcagaccgtgcaaatcttcaaaggtggtggtgaacgcgtggaagccaccttgttccaggaaacgcttcatccccagctcaatacgcgccgcttccagcacgttctgtcgttttttgccgtggatttgtgtggcaggcgtcatggtgtagcagctttcgtactcatcgaccagcgcgttaacatcgccgtcgctgatggagttcaccacctgcaccagatcgccaaccgcccaggtattgacggagaaaccgaacttgatctgtgcggcaactttatcgccatcggtgaccgccacttcacgcatgttatcgccaaatcggcagactttcagatgacgggtatcctgtttagagaccgcctgacgcatccaggagccgatacgctcatgggcttgtttatcctgccagtgaccggtaaccacggcatgttgctgacgcatacgcgcgccaatgaagccgaactcgcgaccgccatgtgcagtctggttcaggttcataaagtccatatcgatactgtcccacggcagcgccgcgttgaactgggtgtggaattgcagcaacggtttgttgagcatggtcaggccgttgatccacattttggccggggagaaggtgtgcagccacaccaccagaccagcgcaacgatcgtcgtaattcgcgtcgcggcaaatagcggtgatttcatccggcgtggtgcccagcggtttcaacaccagtttgcagggcagtttcgcttccgtattcagcgcattaacgacgtgctcggcatgttgggtgacctgacgcagggtttccgggccatacagatgctggctgccaatgacaaaccacacttcataattatcaaaaatcgtcattatcgtgtccttatagagtcgcaacggcctgggcagcctgtgccggggcggaagttggaagatagtgttgttcggcgctcatcgcccattgctgatagcggcgataaagctgttcaaagcgttgtgcctgctcgctgcacggttgcagggttttctctaccgcactggccattttttgctgagcacttgggatgtctgcgtgcactttcgcggcgacggcagcaaaaatcgccgcaccgagcgcacagcactggtcagaggcaacaatttgcagcgggcgattcagcacgtcgcagcaggcctgcataatgacctggtttttccgcgcgatgccgcccagtgccatcacgttattaacggcgatcccctgatcggtaaagcactccatgattgcgcgtgcgccaaaggcggtggcagcaatcaaaccgccgaacagcagcggagcgtcggtagcgaggttaagatcggtaatcacccctttcaggcgttggttagcgttcggtgtgcggcggccgttaaaccagtcgagcaccaccggcaggtgatccagagacggatttttggcccatgcttcggtcagcgccggaagcagttgtttctggctggcgttgatttgcgttttcagttccggatgctgggcggcaagctgttccagcggccagccgagtacgcgaccaaaccaggcgtagatatcaccaaacgcgctttggcctgcttccagaccgataaatccaggcaccacgctgccatcaacctgaccgcaaatacctttaactgcccgctcgccaacgctctgtttgtcggcaatcagaatgtcgcaggtggaagtaccgataacttttaccagtgcgttaggctgtgcgcctgcgccaactgcgcccatatggcagtcaaacgcgccgccggaaatcaccacgctttcaggcaggccgagacgctgcgcccattccgggcataaggtgcccaccggaatatcggcagtccaagtgtcagtgaacagcggggaaggcaaatggcgattgaggatcgggtccagctcatcaaagaaactggctggcggcaggccgccccagctttcgtgccacagagatttatgcccggcgctgcaacgtccgcgacgaatatcctgcgggcgggtggtaccggaaagcagagctggcacccagtcgcacagctcaatccagcttgcggcagattgcgccacggcgctgtcctggcgagtcacatgcaggatttttgcccagaaccattcgctggaataaataccaccaatgtagcgggagtagtcaacgttgcccggcgcgtggcacaaacgggtaatctcttccgcttcttcaaccgcagtgtggtctttccacaatacgaacatcgcgttcgggttttcggcaaactccgggcgcagcgccagcacgtttccgtcggcatcaatcggtgcgggcgtgctgccggtactgtcaacgccaatcccgaccacagctgcgcgctgttcgacgctaagctctgcaagcacggttttcagtgccgcttccatactctcaatgtagtcacgcggatgatgacggaactggttattcggggcatcacaaaattgccctttctgccaacggggataccactctacgctggtggcgatctcttcaccggtagcgcagtccaccgccaaagctcgcacagaatcactgccaaaatcgaggccaattgcaatcgccatcgtttcactccatccaaaaaaacgggtatggagaaacagtagagagttgcgataaaaagcgtcaggtaggatccgctaatcttatggataaaaatgctatggcatagcaaagtgtgacgccgtgcaaataatcaatgtggacttttctgccgtgattatagacacttttgttacgcgtttttgtcatggctttggtcccgctttgttacagaatgcttttaataagcggggttaccggttgggttagcgagaagagccagtaaaagacgcagtgacggcaatgtctgatgcaatatggacaattggtttcttctctgaatggtgggagtatgaaaagtatggctgaagcgcaaaatgatcccctgctgccgggatacagctttaacgcccatctggtggcgggtttaacgccgattgaggccaacggttatctcgatttttttatcgaccgaccgctgggaatgaaaggttatattctcaatctcaccattcgcggtcagggggtggtgaaaaatcagggacgagaatttgtctgccgaccgggtgatattttgctgttcccgccaggagagattcatcactacggtcgtcatccggaggctcgcgaatggtatcaccagtgggtttactttcgtccgcgcgcctactggcatgaatggcttaactggccgagtatatttgccaatacgggtttctttcgcccggatgaagcgcaccagccgcatttcagcgacctgtttgggcaaatcattaacgccgggcaaggggaagggcgctatagcgagctgctggcgataaatctgcttgagcaattgttactgcggcgcatggaagcgattaacgagagcctccatccaccgatggataatcgggtacgcgaggcttgtcagtacatcagcgatcacctggcagacagcaattttgatatcgccagcgtcgcacagcatgtttgcttgagcccgagccgtctgagtcatcttttccgccagcagttagggattagcgtcttaagctggcgcgaggaccaacgcattagtcaggcgaagctgcttttgagcactacccggatgcctatcgccaccgtcggtcgcaatgttggttttgacgatcaactctatttcagccgagtatttaaaaaatgcaccggggccagcccgagcgagtttcgtgccggttgtgaagaaaaagtgaatgatgtagccgtcaagttgagttaattggtaacgaatcagacaattgacggcttgacggagtagcatagggtttgcagaatccctgcttcgtccatttgacaggcacattatgcaagcattgctggaacactttattacccaatccaccgtgtatagtttgatggcggtggtgttggtggcctttctggagagcctggcgctggtcggtttgattctacccggtacggtgctgatggcggggctgggagcgctgattggcagcggcgagttaagtttctggcacgcctggctggcagggattattggctgcttgatgggcgactggatttctttctggctgggttggcgttttaaaaagccgttgcatcgctggagttttctgaagaaaaacaaagcactacttgataaaactgaacatgcgttgcatcaacacagcatgttcaccattctggtcggtcgttttgttggcccgacgcgtccgctggtgccaatggtggcgggaatgctggatctgccggtggctaaatttattacgccgaatattatcggctgcctgctgtggccgccgttttacttcctgccagggattctggcgggcgcggcgatcgatattcctgccggaatgcagagcggtgagtttaaatggttgctgctggcaacagcggtgtttttgtgggttggtggctggctgtgctggcggttatggcgcagcggtaaagcgactgaccgtttgagtcattatttgtcccgcggtcgtttgttgtggctgacgccgttgatttctgccatcggcgtggtggcgctggtggtgttaattcgccacccgttgatgccggtgtatatcgatattttgcgtaaagtggttggggtttaagagatagtcttgtgcgggttgcctgatgcgacgcttgccgcgtcttatcaggcctacaaaacgcactacccgtaggtcggataaggcgttcacgccgcatccgacagtgcatattaacccgtaatccccaatagtgcgctagcactcgccttaccgctcaacaactcattggtcataccctgccaggcgatgcgcccgtcggcgactactacgctgcgcgtggcgatccgcgccgcatcttccacgctgtggctcaccatcaatagcgtcattttttgctgctggcagctcgtgctcaccagcgtcaacatctcctgacgtaacgccggatcgagcgcagagaacggttcatcgagcaataaaatcggctgttcgcgtaccagacaacgcgctaacgccactcgctgtcgctgaccgccggaaagctcgcccggtaaccgcgccattaaattatcaatccccatctggcgggcgatagcgtgcattttcccctgctgtaccgcgttcagtttcaatcccggatttagccccagcccgatgttctgtgcgaccgtcaggtggctgaacaggttgttctcctgaaacagcatgctcaccggacggcgactcggcggcatagttgtgtgatctacgccatcgatagtcaggctaccgctggctggcgtcagaaaaccggcgatcaaattcagcagggtacttttacccgcgccgcttggcccgaggatcgccacctgctcgccgcgttccaccgttaagctaaaacgcatcggcaaatggtggtaaagccaggtgatatcagtcagttttaacatttcgccccggtagtttttcaatcacggtaaacagcagaaaacagagcagcagcagaattaacgcggtgaccgcaccgtcctggctgcgataggagccaatttgctggtagagataaaacggcagggtgcggaaatcatcgttaccgaacaacgccaccacgccaaaatcaccaatgctcagcacgcatgcaaaggccagcgcctgcgccagtggacgtttcagggcgcgcagctccaccacttttaagcgactccagccttcaatccccaggctctgacataacatgctgtagcgggcggtgatatcgcgcatcgggttttccagcactttcagcgcataagggatcgccattaacgcattggtgaaaatcacaatgccgtcagcagattgtggcaggccgatagtgttgttgagcagtaaaaagaagccggtagccagcacaatccccggcatggcgaggatcaacatgccgctcatctccagcacctgacccgccagcattttctgccgcgcccgcagttcgcgactgctccatagcagcatcatggtcagcactacgcacaatacacctgccgccagcgcaatacgcaagctggtccacagcgcctgccacagcaccggttgtgccagcacttccggcaactggcgatttaccccatcgacgatcaccgccagtaacggtggcagcaacagcagcagcgccagcacaattaacaccgtgtcgcaaatgcggctatgcagacgatcgtccgggtcgcgccagccttgcagcagcgtggtgccgggcgcaatggccttactcaatcgctgactcaacagcaccagcccgaggcagcacaccatctggagcagcgccagcattgccgcgcgggcaggatcgtagtcgtaactcagcgcctgatagattgccagctcgatagtggtcgcctgcggaccgccccccaggcttagcacggtggcgaagctggcgaaacagagcataaagataagcgcagcaaccggcgggatttgtcgccgtaaccacggccattcgacgaagcggaaaaaatgccagctacgcatcccaagctgggcggcaagttgacgctgttcgccggggatgttttccagtgcctggagtaataagcggctcgccatcggcagattaaaaaacacatgggccagcaaaataccttgcaggccgtaggggctaaaggtccactccagaccgaggctttggcagagtgttgccagccagccctggcgaccatagacgctaagaatgccgaaaacagcgaccaacaccgggaggatcaaggtcattgcacacagacgcaacagcgccagccgacccggaaagcgcctgcgatagagcgcgcgggcgaggaatatcgcgggtatgacagagagcagtgcgctgagaaacgcctgccagaaggagaagcgcaccacatgccacagatagctgtcctgccagactgccacccagtcatcctgcggcgcgttccaccacagggcgagaaacgccgccagcgcaaccgctaccaccagcgtggtggcgcttacacctggaattaaccagccgggaattaacggctgacggcgcgttgccattcgctaatccatgcctgacgttgtgccgccacttcggctggcgtgaactccaacgtggttgcgggtttggtcaatttttcaaaaccggcaggcagcgtgacgtttgccaccggatacatccagttgccggttgggatcgcattctggaaagccggagaaaccataaactggaggaatttttgcgccagctccggctgcttgctggcagcggtgcgggcggcgacttccacttgcagatagtgaccttcgctgaagttcgcggcggcgtagttatctttcttctcttcgagaatgtgataagccggagaggtggtgtaactcagtaccagatcgctttcaccttttaaaaacaggccgtaggcttcgctccagcctttggtgaccgtgaccgttttcttcgccagtttctgccaggcttgtggggcgtcatcgccatagactttttgcatccatagcaacagacccagccccggtgtactggtgcgcggatcctgataaatcacccgccagttttgatcgctctcaaccagttctttcaggctttgtggcgggtttttcagtttgttcttgtcataaacgaaggcgaagtagccataatcaaacggtacgaaagtgtcattattccagccgccgggaacgttaacggcatccgctgccacaccgcttttggcaaacagtccggttttactggcggcgtctaacaggttgttatccagccccagcaccacatcggctttactgtttttgccttccatccgtagacggttgagaaggctaacgccatcttccagcgccaccagtttcagttcgcaattacagtcggcttcaaaggcttttttaaccaccggaccaggcccccagtcggcggcgaaggaatcgtaggtataaacagtcagaacgggtttagcgaaaacgggcgctgtgcacagcaacagcaggggcagacatttttttaacactttgcacctcaaaaaagagtggcaaaggacttgagaaggagcctcaaatcccttcgccggcgttatccggatcaggttcgacgggtattttctcagcgcacgcgtacgcgtggcaccccgttgagaacggcgttagtgtagtgattttgttatcaaccagcaatcatggatccggtggcgcaaaccacgcacttttaaaatcgaaccagccgagggtattcatgcgcaggccgcgcatactgcgttgcccctgaatgatcagccagtggtgcaataatggcaccatcgctttgctggcgaccagttgctggcaccagttcgccagattcatctcgccattgcgccagcgagcagcgtcggcttgccagtcaatgggaatgcaatgttgtagcagtggcacttcgcataaatgtgcgaaaacagagaagtccagcggcagggtaaagttggcgctgtttagccagatatcactttcgatctctcctgtatgccactgatcgtagtcgatctctttgattttcagcgtgacctggtgacttgccagaatctgctgcatgatcccggcaatcacccgatgctcactgtgatcctgataaaaggttagggtgaggctttccaggccagccggtttttcgctctttatggtgcgggcatggtgccaacgggggagcagtccataagccgggaaccacagttgctggtactgttcctcagcgaaatagaccagattagttggagaaagcacatagcttacccagtccctgacttgctgattcgccccgcgatgggtgcggctgtcgaacagtaaatagtagcaaccttcctccaggcggctttcaatctctttttcctcgccctgtggaccttttagcatcagccctccggctggctcgtcggcaatttccggcagaacccagacgttaacttcgtcgattaatgcccggtaaccgaagaagtcatcgaatgcctgaattttcagttgattggtgctgttgcgaatcaccgcatacggaccggtgccgatgggatggctggcaaagttactgagggtttcccattcgcgcggcaggatcatcgccggaacttgccccagcagtaacggtaaccagcggtccggttgcgtgagatggatatccagcgtccagggcgtcgggctcacaatgtcagcaatatggctatagagcggcagcgtattgattcgttttaaagaggcgatcacatcgtccatttccagttcacgaccatggtgaaaatggactcctggacgcaaaaagaaacgccagtgaagcggactaatttgctgccagtggtgggcgatgtctgcttccagttccccattttcctcatttatgcgcgttaggctactgaagatttgccgggcgatatgggtttcggaacggcgcaatgcgctgccaggtagcagattacgcaacggacgatagtagagcacgcgcaggatgtgccgcccctggcggaagctgcggcccagatgagaaaccagcatttgccgcacagtcgctttgtcgccaaccaactgcaccagttgatcgatacgatcctgctccagcaggtcttccgcccgctgttgctgaagcgccagcccggtatagaggaatgtcagacggctgcgtttaccgcgcccgacttccgcttcccacgtcagccagccgcgatcctgcatggtgttgagcagggtgcgcatatgacgacggctgcagctcaataacgctgccagttcgttgagcgttgtgtcctggcttttaccctcgcagcattgccacaggcggatgaactgttgttgcagacgagcagatggcataaaaggggaactcctgtgcaaaagacagcaattttattttccctatattaagtcaataattcctaacgatgaagcaagggggtgccccatgcgtcagttttatcagcactattttaccgcgacagcgaagttgtgctggttgcgttggttaagcgtcccacaacgattaaccatgcttgaaggactgatgcagtgggatgaccgcaattctgaaagttgacttgcctgcatcatgtgtgactgagtattggtgtaaaatcacccgccagcagattatacctgctggttttttttattctcgccgcgctaaaaagggaacgtatgatctggataatgacgatggctcgccgtatgaacggtgtttacgcggcatttatgctggtcgcttttatgatgggggtggccggggcgctacaggctcctacattgagcttatttctgagtcgtgaggttggcgcgcaacctttctggatcggcctcttttatacggtgaatgctattgctgggatcggcgtaagcctctggttggcaaaacgttctgacagtcagggcgatcggcgaaaactgattatattttgctgtttgatggctatcggcaatgcgctattgtttgcatttaatcgtcattatctgacgcttatcacctgtggtgtgcttctggcatctctggccaatacggcaatgccacagttatttgctctggcgcgggaatatgcggataacagcgcgcgagaagtggtgatgtttagcagcgtgatgcgtgcgcagctttctctggcatgggttatcggtccaccgttggcctttatgctggcgttgaattacggctttacggtgatgtttagcattgccgccgggatattcacactcagtctggtattgattgcatttatgcttccgtctgtggcgcgggtagaactgccgagcgaaaatgctttaagtatgcaaggtggctggcaggatagtaacgtacggatgttatttgtcgccagcacgttaatgtggacctgcaacaccatgtacattattgatatgccgttgtggatcagtagcgagttaggattgccagacaaactggcgggtttcctgatggggacggcagctggactggaaataccagcaatgattctggctggctactatgtcaaacgttatggtaagcggcgaatgatggtcatagcagtggcggcaggagtactgttttacaccggattgattttctttaatagccgtatggcgttgatgacgctgcaactttttaacgctgtatttatcggcattgttgcgggtattgggatgctatggtttcaggatttaatgcctggaagagcgggggcagctaccaccttatttactaacagtatttctaccggggtaattctggctggcgttattcagggagcaattgcacaaagttgggggcactttgctgtctactgggtaattgcggttatttctgttgtcgcattatttttaaccgcaaaggttaaagacgtttgatgacgtggacgatagcggaaagcccggtcatttgaccgggcaaggggattaattcataaacgcaggttgttttgcttcataagcggcaatggcgtcgtcgtgctgcaaggtaagcccaatactgtccagaccgttcatcatgcagtggcggcggaaggcatcgatggtaaagcgataggttttctctcccgctttcacctcttgcgcttccagatccacgtcgaaatggatccccggattagctttcaccagcgcaaacagttcgtccacttctgcatcgcttaatttcaccggcagcagctggttgttaaagctattgccgtagaagatgtcagcaaaactcggcgcaatcaccactttaaaaccgtagtcggtcaatgcccagggcgcgtgctcacggctagagccacagccgaagttttctcgtgccagcaaaatggaagcgccctgatactgcgggaagttcagcacgaagtccgggtttggctgttggcctttttcatccagaaaacgccagtcgttaaacagatgcgcgccaaaacccgtacgggtcactttctgcaaaaactgtttcgggatgattgcatcggtatcgacattggcggcatccagcggaaccaccaggcctgtgtgtttgataaatttctctgccatggtgtgctccttatttaatgttgcgaatgtcggcgaaatgtccggtcacagcagcagcggcagccattgccgggctgaccagatgcgtgcgcccgccgcgcccctggcggccttcaaagttacggttgctggtggaggcacaacgttcgcccggattcagacggtcgttgttcatcgccagacacatactgcagccaggcaagcgccattcaaaaccggcttcaataaagattttatccagaccttccgcttccgcctgggcttttaccgggccagagccgggaaccaccagtgcctgcacgcctggcgcgacttttcgccctttggcgatctccgctgccgcgcgtaaatcttcaatgcggctgttggtacaggaaccgataaacactttgtcgatagccacttcggtcagcggaatacccggtttcagccccatataggccagcgctttttctgcgctcgcgcgttcaaccggatcggcaaagctagccggatcgggaatattgtcgttcacggaaatcacctggccgggattggtgccccaggtgacctgcggactaatttcttctgcttgcagagtgacaacggtatcgaaagttgcgccttcgtcggtttgcagggttttccagtaggcaacggcgtcgtcgaaatctttgcctttcggcgcatgcagacggcctttgacatagttaaaggtggtttcgtccggtgcaaccagaccggcttttgcgcccatttcgattgccatattgcacagggtcatacgaccttccatgcttaaatcacggattgcttcgccgcaaaactccaccacatgcccggtgccgcctgcgctaccggttttaccgataattgccagcacgatatcttttgcggtaatgcccggcgcggctttgccctggacttcaattttcatggtttttgcgcggccctgtttcagggtttgcgttgccagtacgtgttcaacttcggaagtgccgataccaaaggccagtgcgccaaacgcgccgtgggtggcggtatggctgtcgccgcagacaatggtcatccccggcaaggtgacgccctgttccggccccattacgtggacgatcccctgatacgggtgattcaggtcatacagttcgacgccaaattctttgcagtttttgatcagttcctgcatctggatacgcgccatttcaccgcaggcattaatgtctttggtctgggtagagacgttgtgatccatggtagcgaaggttttgcccggctgacgtaccgggcgaccgtgggcgcgcagaccatcgaacgcctgcggactggtcacttcatgcaccaggtggcggtcgatatataacagtggggtttcgttttcggcttcgtacacaacgtgagcgtcgaacaatttttcgtataacgtcttagccatgattacaccccttctgctacatagcgggcaatgatatcgcccatttcatcggtactaacggcggcagcgccacgggctaaatccccggtgcgaatgccttcttctaatgcgcggttaatggcgcgttcaatggcgcaagccgcatcatcggcatccaggctgtaacgcagcagcagtgccaggctaaggatttgtgcaatcgggttggcgatgtttttgcctgcgatatctggtgcgctgccgcccgccggttcatacagtccaaaaccttgctcgttcaggctggcggaaggcaacatccccatgctgccagtgatcattgcgcactcgtcagacagaatgtcgccaaacaggttggagcacagcagaacgtcaaactgacttggatctttaatcagctgcatggtggcgttgtcgatgtacatatgcgccagttcgacatccgggtattccgtggcgatctcgttaacgatctcccgccataaaatagaggattgcagcacgttggctttatcgatgctcgtcactttgtggcgacgcttgcgagcagattcaaacgcgatgcgggcgatacgttcgatctcaaaacggtgatacacctcggtatcaaaggctttttcatattgtccgctaccttcgcggccttttggctgaccgaaatagatgccgccggtcagttcgcgcacacacaggatgtcgaagccgtttgcggcaatgtctgcacgcagcggacagaatgcttccagcccctgatacagttttgccgggcgcaggttgctgaataatttgaagtgcttacgcagaggcagcagcgcgccgcgttctggttgctggtctggtggtaaatgttcccacttcgggccgcctacgctgccaaacagcacggcatcggcttgctcacaaccttcaaccgtcgcaggcggcagtggttgcccgtggttatcaatggctgcgccgcctacatcgtaatggctggtggtgatgcgcatcgcaaagcggttgcgcacggcatccagcactttcagcgcctgggtcatcacttccggaccaataccgtcccccggcaatacggcaatatggtaattcttgctcatcacacggtttccttgttgttttcgttgtgttgagctttgcgttgcaactctttttcgacttctgcggcacgccagatattgttcagaacgtgcaccatggctttggcagaactctcgacaatatcggtagccaggccgacgccgtggaagcggcgaccgttgtagttagcgacgatatccacctgacccagcgcatctttaccgtggcctttggcggtcaggctgtatttcaccagttcgacgttatattcagtgatgcggttaattgcctgatagacggcatcgaccggaccgttaccgttggcggcttctgctttgacttcttcgccacaggccagtttgacggcggcggtggcgatatcgttagagccagactgcacgctgaagtaatccagacggaaatgctccggctcttcttgctgcttaccgatgaaggccagcgcctccagatcgtaatcaaacacctgaccttttttgtccgccagcttcaggaaagcatcgtacaaattgtctaaattatattcactttctttataccccatctcatccatgcgatgtttcaccgccgcacgcccgctacgagaggtcagattcagctggatttggttcagaccaatagattctggtgtcatgatttcgtagttttcgcggtttttcagcacgccatcctggtgtataccggaggagtgtgcgaatgcgccgctgccaacaatggctttgtttgccgggatcggcatattacaaatctggctaactaactggctggtgcgccatatctcctggtgattaatggcggtgtggacgttgagaatatccttacgaactttgatcgccatgatgacttcttccagggaacagtttccggcacgctcgccgatcccgttcattgcgccttccacctggcgtgcaccggcatgtaccgccgccagactgtttccgaccgccaggcccaaatcgtcgtgggtatgtacggagataatggctttgtcgatgttaggcacgcgttcatacaggccgctgatgattccggcgaactcaaacggcatggtgtagcccacggtgtccggaatgttgatggtggtggcaccggcattaatcgccgcttcgaccactcgcgccagatcggcaatgggtgtacgcccggcatcttcgcaagaaaattcaacatcatcggtgtaattacgggcgcgtttcaccatatagatagcgcgttcgatcacctcgtccagcgtgctgcgcagcttggtggcgatgtgcattgggctagtggcaataaaggtatgaatacggaaggcttcggcgactttcagggattcggccgccacgtcgatatctttttccacgcagcgagctaacgcacatacgcggctgtttttaacctggcgggcgatggtttgcacgctttcaaaatcgcccgggctagagacggggaaaccgacttccatcacgtcaacacccatacgctcaagggccagcgcaatttgcagtttttctttcacactcaagcttgcctgtaacgcctgttcaccgtcgcgcaatgtggtatcgaaaataatgacttgctggctcatggtttgggtccttgtctcttttagagcgcctcgcttcgggcataaaaaaacccgcgcaatggcgcgggttttttgtttgactgcgtgctggcttaatgctggatgccgctcactcgtctaccgcgcaaagaagatgcgtttagtagtagtagaccgataaagcgaacgatgtgagtcattaaatcagctccagatgaatgcgatatgcttttagagttactggatacaaaaacggatgtcaaccctgacgcaataaaaacgtcccgccagcgtgagttctgcatccgtaaaattagctaattgtgctgcggtggttaaagtaagcgatattaatttctgcttaactaccgacgcttttcatcggttgacatatttcagcataaatttttgcatctaatcaacgaggaaaaaggggacaaaatgcacgcgttgcaaaacctatcctgatgatttgtattgaattatatgttttgcgattttttttgatattgatttggtgaatattattgatcaattaatgttaagaattaatgcattaaatatataaattaattattaaataagcacatttaatccattttgtagatgattgagtattcgcggtagttatgattagattgttttcgcaacaaaaacattatggattattatgctgtggtaaatgactcattccacggcaatggattctgtttttatcagaacccgtatctttatgttttccgaattttactcattttgctttttcttattttatatgcatgataaatcatattcttcaggattatttctctgcattccaataagggaaagggagttaagtgtgacagtggagttaagtatgccagaggtacaaacagatcatccagagacggcggagttaagcaaaccacagctacgcatggtcgatctcaacttattaaccgttttcgatgccgtgatgcaggagcaaaacattactcgtgccgctcatgttctgggaatgagccaacctgcggtcagtaacgctgttgcacgcctgaaggtgatgtttaatgacgagctttttgttcgttatggccgtggtattcaaccgactgctcgcgcatttcaactttttggtagtgttcgtcaggcattgcaactagtacaaaatgaattgcctggtagtggttttgaacccgcgagcagtgaacgtgtatttcatctttgtgtttgcagcccgttagacagcattctgaccagccagatttataatcacattgagcagattgcgccaaatatacatgttatgttcaagtctagtttaaatcagaacactgaacatcagctgcgttatcaggaaacggagtttgtgattagttatgaagacttccatcgtcctgaatttaccagcgtaccattatttaaagatgaaatggtgctggtagccagcaaaaatcatccaacaattaagggcccgttactgaaacatgatgtttataacgaacaacatgcggcggttagcctcgatcgtttcgcgagttttagtcaaccttggtatgacacggtagataagcaagccagtatcgcgtatcagggcatggcaatgatgagcgtacttagcgtggtgagccaaacgcatttggtcgctattgcgccgcgttggctggctgaagagttcgctgaatccttagaattacaggtattaccgctgccgttaaaacaaaacagcagaacctgttatctctcctggcatgaagctgccgggcgcgataaaggccatcagtggatggaagagcaattagtcagtatttgcaaacgctaactgattgcagaataggtcagacatgaatgtctggtttattctgcattttttattgaatgtagaattttattctgaatgtgtgggctctctattttaggattaattaaaaaaatagagaaattgctgtaagttgtgggattcagccgatttattatcaatttaatcctctgtaatggaggattttatcgtttcttttcacctttcctcctgtttattcttattaccccgtgtttatgtctctggctgccaattgcttaagcaagatcggacggttaatgtgttttacacattttttccgtcaaacagtgaggcaggccatggagatgttgtctggagccgagatggtcgtccgaagccttatcgatcagggcgttaaacaagtattcggttatcccggaggcgcagtccttgatatttatgatgcattgcataccgtgggtggtattgatcatgtattagttcgtcatgagcaggcggcggtgcatatggccgatggcctggcgcgcgcgaccggggaagtcggcgtcgtgctggtaacgagcggtccaggggcgaccaatgcgattactggcatcgccaccgcttatatggattccattccattagttgtcctttccgggcaggtagcgaccagcttgataggttacgatgcctttcaggagtgcgacatggtggggattagccgaccggtggttaaacacagttttctggttaagcaaacggaagacattccgcaggtgctgaaaaaggctttctggctggcggcaagtggtcgcccaggaccagtagtcgttgatttaccgaaagatattcttaatccggcgaacaaattaccctatgtctggccggagagcgtcagtatgcgttcttacaatcccactactaccggacataaagggcaaattaagcgtgctctgcaaacgctggtagcggcaaaaaaaccggttgtctacgtaggcggtggggcaatcacggcgggctgccatcagcagttgaaagaaacggtggaggcgttgaatctgcccgttgtttgcagtttgatggggctgggggcgtttccggcaacgcatcgtcaggcactgggcatgctgggaatgcacggtacctacgaagccaatatgacgatgcataacgcggatgtgattttcgccgtcggggtacgatttgatgaccgaacgacgaacaatctggcaaagtactgcccaaatgccactgttctgcatatcgatattgatcctacttccatttctaaaaccgtgactgcggatatcccgattgtgggggatgctcgccaggtcctcgaacaaatgcttgaactcttgagccaagaatccgcccatcaaccactggatgagatccgcgactggtggcagcaaattgaacagtggcgcgctcgtcagtgcctgaaatatgacactcacagtgaaaagattaaaccgcaggcggtgatcgagactctttggcggttgacgaagggagacgcttacgtgacgtccgatgtcgggcagcaccagatgtttgctgcactttattatccattcgacaaaccgcgtcgctggatcaattccggtggcctcggcacgatgggttttggtttacctgcggcactgggcgtcaaaatggcgttgccagaagaaaccgtggtttgcgtcactggcgacggcagtattcagatgaacatccaggaactgtctaccgcgttgcaatacgagttgcccgtactggtggtgaatctcaataaccgctatctggggatggtgaagcagtggcaggacatgatctattccggccgtcatagtcaatcttatatgcaaagcctacccgatttcgtccgtctggcggaagcctatgggcatgtcgggatccagatttctcatccgcatgagctggaaagcaaacttagcgaggcgctggaacaggtgcgcaataatcgcctggtgtttgttgatgttaccgtcgatggcagcgagcacgtctacccgatgcagattcgcgggggcggaatggatgaaatgtggttaagcaaaacggagagaacctgattatgcgccggatattaagtgtcttactcgaaaatgaaagtggcgcgttatcccgcgtgattggccttttttcccagcgtggctacaacattgaaagcctgaccgttgcgccaaccgacgatccgacattaagccgtatgaccatccagaccgtgggcgatgaaaaagtacttgagcagatcgaaaagcaattacacaaactggtcgatgtcttgcgcgtgagtgagttggggcagggcgcgcatgttgagcgggaaatcatgctggtgaaaattcaggccagcggttacgggcgtgacgaagtgaaacgtaatacggaaatattccgtgggcaaattatcgatgtcacacccagcctttataccgttcaattagcaggcaccagcggtaagcttgatgcatttttagcaagcattcgcgatgtggcgaaaattgtggaggttgctcgctctggtgtggtcggacttagccgcggcgataaaataatgcgttgagaatgatctcaatgcgcaatttacagcccaacatgtcacgttgggctttttttgcgaaatcagtgggaacctggaataaaagcagttgccgcagttaattttctgcgcttagatgttaatgaatttaacccataccagtacaatggctatggtttttacattttacgcaaggggcaattgtgaaactggatgaaatcgctcggctggcgggagtgagccggaccactgcaagctatgttattaacggcaaagcgaagcaataccgtgtgagcgacaaaaccgttgaaaaagtcatggctgtggtgcgtgagcacaattaccacccgaacgccgtggcagctgggcttcgtgctggacgcacacgttctattggtcttgtgatccccgatctggagaacaccagctatacccgcatcgctaactatcttgaacgccaggcgcggcaacggggttatcaactgctgattgcctgcagtgaagatcagccagacaacgaaatgcggtgcattgagcaccttttacagcgtcaggttgatgccattattgttagcacgagcttgcctcctgagcatcctttttatcaacgctgggctaacgacccgttcccgattgtcgcgctggaccgcgccctcgatcgtgaacacttcaccagcgtggttggtgccgatcaggatgatgccgaaatgctggcggaagagttacgtaagtttcccgccgagacggtgctttatcttggtgcgctaccggagctttctgtcagcttcctgcgtgaacaaggtttccgtactgcctggaaagatgatccgcgcgaagtgcatttcctgtatgccaacagctatgagcgggaggcggctgcccagttattcgaaaaatggctggaaacgcatccgatgccgcaggcgctgttcacaacgagctttgcgttgttgcaaggagtgatggatgtcacgctgcgtcgcgacggcaaactgccttctgacctggcaattgccacctttggcgataacgaactgctcgacttcttacagtgtccggtgctggcagtggctcaacgtcaccgcgatgtcgcagagcgtgtgctggagattgtcctggcaagcctggacgaaccgcgtaagccaaaacctggtttaacgcgcattaaacgtaatctctatcgccgcggcgtgctcagccgtagctaagccgcgaacaaaaatacgcgccaggtgaatttccctctggcgcgtagagtacgggactggacatcaatatgcttaaagtaaataagactattcctgactattattgataaatgcttttaaacccgcccgttaattaactcaccagctgaaattcacaataattaagtgatatcgacagcgcgtttttgcattattttgttacatgcggcgatgaattgccgatttaacaaacacttttctttgcttttgcgcaaacccgctggcatcaagcgccacacagacgtaacaaggactgttaaccggggaagatatgtcctaaaatgccgctcgcgtcgcaaactgacactttatatttgctgtggaaaatagtgagtcattttaaaacggtgatgacgatgagggattttttcttacagctattcataacgttaatttgcttcgcacgttggacgtaaaataaacaacgctgatattagccgtaaacatcgggttttttacctcggtatgccttgtgactggcttgacaagcttttcctcagctccgtaaactcctttcagtgggaaattgtggggcaaagtgggaataaggggtgaggctggcatgttccggggagcaacgttagtcaatctcgacagcaaagggcgcttaagtgtgcctacccgttatcgggaacagctgcttgagaacgctgccggtcaaatggtttgcaccattgacatttatcacccgtgcctgctgctttaccccctgcctgaatgggaaattatcgagcaaaaattaagccgtctgagcagcatgaacccggttgagcgccgtgtgcagcgcctactgttaggtcatgccagcgaatgtcagatggatggcgcaggtcgattgttaatcgcgccagtactgcggcaacatgccgggctgacaaaagaagtgatgctggttggacagttcaacaagtttgagctgtgggatgaaacaacctggcatcaacaggtcaaggaagatatcgacgcagagcagttggctaccggagacttaagcgagcgactgcaggacttgtctctataaaatgatggaaaactataaacatactacggtgctgctggatgaagccgttaatggcctcaatatccgtcctgatggcatctacattgatgggacttttggtcgcggtggtcacagtcgtctgatcctcagccagcttggcgaagaggggcgtttgctggcgatcgatcgcgacccgcaggctatcgccgttgcgaagactattgatgatccgcgcttctccatcatccacggacctttctccgcgctgggcgaatacgttgccgagcgcgatcttatcggcaagatcgacggcattctcctcgatcttggcgtctctagtccgcaacttgatgatgctgaacgtggcttttcctttatgcgcgatggtccgctggacatgcgtatggacccaacccgtgggcagagtgccgctgaatggctacaaaccgcagaagaagccgatatcgcctgggtattgaaaacctatggtgaagagcgttttgccaaacgcattgcccgcgccattgtcgagcgtaaccgcgaacagccgatgacccgcaccaaagaactggcggaagtcgtggctgctgcaacgccggtgaaagataagtttaaacatcccgcgacccgtaccttccaggcggtgcgcatttgggtaaacagtgaactggaggagatagagcaggcgctaaaaagcagcctcaacgtgctggccccgggtgggcggcttagcatcatcagcttccacagcctggaagaccgtattgtgaaacgttttatgcgtgaaaacagccgcggtccgcaagttccggcagggttaccgatgactgaagagcagctcaaaaaactgggtggccgtcagctgcgagcactaggcaagttaatgccgggcgaagaagaggtggctgagaaccctcgtgcccgtagtagtgttctgcgtattgcagagaggacgaatgcatgatcagcagagtgacagaagctctaagcaaagttaaaggaagcatgggaagccacgagcgccatgcattgcctggtgttatcggtgacgatcttttgcgatttgggaagctgccactctgcctgttcatttgcattattttgacggcggtgactgtggtaaccacggcgcaccatacccgtttactgaccgctcagcgcgaacaactggtgctggagcgagatgctttagacattgaatggcgcaacctgatccttgaagagaatgcgctcggcgaccatagccgggtggaaaggatcgccacggaaaagctgcaaatgcagcatgttgatccgagtcaagaaaatatcgtagtgcaaaaataaggataaacgcgacgcatgaaagcagcggcgaaaacgcagaaaccaaaacgtcaggaagaacatgccaactttatcagttggcgttttgcgttgttatgcggctgtattctcctggcgctggcttttctgctcggacgcgtagcgtggttacaagttatctccccggatatgctggtgaaagagggcgacatgcgttctcttcgcgttcagcaagtttccacctcccgcggcatgattactgaccgttctggtcgcccgttagcggtgagcgtgccggtaaaagcgatttgggctgacccgaaagaagtgcatgacgctggcggtatcagcgtcggtgaccgctggaaggcgctggctaacgcgctcaatattccgctggatcagcttagtgcccgcattaacgccaacccgaaagggcgctttatttatctggcgcgtcaggtgaaccctgacatggcggactacatcaaaaaactgaaactgccggggattcatctgcgtgaagagtctcgccgttactatccgtccggcgaagtgactgctcacctcatcggctttactaacgtcgatagtcaagggattgagggcgttgagaagagtttcgataaatggcttaccgggcagccgggtgagcgcattgtgcgtaaagaccgctatggtcgcgtaattgaagatatttcttctactgacagccaggcagcgcacaacctggcgctgagtattgatgaacgcctgcaggcgctggtttatcgcgaactgaacaacgcggtggcctttaacaaggctgaatctggtagcgccgtgctggtggatgtcaacaccggtgaagtgctggcgatggctaacagcccgagttacaaccctaacaatctgagcggcacgccgaaagaggcgatgcgtaaccgtaccatcaccgacgtgtttgaaccgggcagtacggttaaaccgatggtggtaatgaccgcgttgcaacgtggcgtggtgcgggaaaacagcgtactcaataccattccttatcgaattaacggccacgaaatcaaagacgtggcacgctacagcgaattaaccctgaccggggtattacagaagagcagtaacgtcggtgtttccaagctggcgttagcgatgccgtccagtgcgttagtagatacttacagtcgttttggactgggaaaagcgaccaatttggggttggtcggagaacgcagtggcttatatcctcaaaaacaacggtggtctgacatagagagggccaccttctctttcggctacgggctaatggtaacaccattacagttagcgcgagtctacgcaactatcggcagctacggcatttatcgcccactgagcattaccaaagttgaccccccggttcccggtgaacgtgtcttcccggaatccattgtccgcactgtggtgcatatgatggaaagcgtggcgctaccaggcggcggcggcgtgaaggcggcgattaaaggctatcgtatcgccattaaaaccggtaccgcgaaaaaggtcgggccggacggtcgctacatcaataaatatattgcttataccgcaggcgttgcgcctgcgagtcagccgcgcttcgcgctggttgttgttatcaacgatccgcaggcgggtaaatactacggcggcgccgtttccgcgccggtctttggtgccatcatgggcggcgtattgcgtaccatgaacatcgagccggatgcgctgacaacgggcgataaaaatgaatttgtgattaatcaaggcgaggggacaggtggcagaagctaaagcctgagcgcttcgcgctggttgttgttatcaacgatccgcaggcgggtaaatactacggcggcgccgtttccgcgccggtctttggtgccatcatgggcggcgtattgcgtaccatgaacatcgagccggatgcgctgacaacgggcgataaaaatgaatttgtgattaatcaaggcgaggggacaggtggcagatcgtaatttgcgcgaccttcttgctccgtgggtgccagacgcacctagccgagcactgcgagagatgacactcgacagccgtgtggctgcggcgggcgatctctttgtagctgtagtaggtcatcaggcggacgggcgtcgatatatcccgcaggcgatagcgcaaggtgtggctgccattattgcagaggcgaaagatgaggcgaccgatggtgaaatccgtgaaatgcacggcgtaccggtcatctatctcagccagctcaacgagcgtttatctgcactggcgggccgcttttaccatgaaccctctgacaatttacgtctcgtgggcgtaacgggcaccaacggcaaaaccacgactacccagctgttggcgcagtggagccaactgcttggcgaaatcagcgcggtaatgggcaccgttggtaacggcctgctggggaaagtgatcccgacagaaaatacaaccggtagcgcagtcgatgttcagcatgagctggcggggctggtggatcagggcgcgacgttttgcgcaatggaagtttcctcccacgggctggtacagcaccgtgtggcggcattgaaatttgcggcgagcgtctttaccaacttaagccgcgatcaccttgattatcatggtgatatggaacactacgaagccgcgaaatggctgctttattctgagcatcattgcggtcaggcgattattaacgccgacgatgaagtgggccgccgctggctggcaaaactgccggacgcggttgcggtaagtatggaagatcatattaatccgaactgtcacggacgctggttgaaagcgaccgaagtgaactatcacgacagcggtgcgacgattcgctttagcagtagttggggcgatggcgaaattgaaagccatctgatgggcgcttttaacgtcagcaacctgctgctcgcgctggcgacactgttggcactcggctatccactggctgatctgctgaaaaccgccgcgcgtctgcaaccggtttgcggacgtatggaagtgttcactgcgccaggcaaaccgacggtggtggtggattacgcgcatacgccggatgcactggaaaaagccttacaggcggcgcgtctgcactgtgcgggcaagctgtggtgtgtctttggctgtggtggcgatcgcgataaaggtaagcgtccactgatgggcgcaattgccgaagagtttgctgacgtggcggtggtgacggacgataacccgcgtaccgaagaaccgcgtgccatcatcaacgatattctggcgggaatgttagatgccggacatgccaaagtgatggaaggccgtgctgaagcggtgacttgcgccgttatgcaggctaaagagaatgatgtggtactggtcgcgggcaaaggccatgaagattaccagattgttggcaatcagcgtctggactactccgatcgcgtcacggtggcgcgtctgctgggggtgattgcatgattagcgtaacccttagccaacttaccgacattctcaacggtgaactgcaaggtgcagatatcacccttgatgctgtaaccactgatacccgaaaactgacgccgggctgcctgtttgttgccctgaaaggcgaacgttttgatgcccacgattttgccgaccaggcgaaagctggcggcgcaggcgcactactggttagccgtccgctggacatcgacctgccgcagttaatcgtcaaggatacgcgtctggcgtttggtgaactggctgcatgggttcgccagcaagttccggcgcgcgtggttgctctgacggggtcctccggcaaaacctccgttaaagagatgacggcggcgattttaagccagtgcggcaacacgctttatacggcaggcaatctcaacaacgacatcggtgtaccgatgacgctgttgcgcttaacgccggaatacgattacgcagttattgaacttggcgcgaaccatcagggcgaaatagcctggactgtgagtctgactcgcccggaagctgcgctggtcaacaacctggcagcggcgcatctggaaggttttggcagccttgcgggtgtcgcgaaagcgaaaggtgaaatctttagcggcctgccggaaaacggtatcgccattatgaacgccgacaacaacgactggctgaactggcagagcgtaattggcagtcgcaaagtgtggcgtttcagtcccaatgccgccaacagcgatttcaccgccaccaatatccatgtgaccagccacggtacggaatttaccctacaaaccccaaccggtagcgtcgatgttctgctgccgttgccggggcgtcacaatattgcgaatgcgctggcagccgctgcgctctccatgtccgtgggcgcaacgcttgatgctatcaaagcggggctggcaaatctgaaagctgttccaggccgtctgttccccatccaactggcagaaaaccagttgctgctcgacgactcctacaacgccaatgtcggtagtatgactgcagcagtccaggtactggctgaaatgccgggctaccgcgtgctggtggtgggcgatatggcggaactgggcgctgaaagcgaagcctgccatgtacaggtgggcgaggcggcaaaagctgctggtattgaccgcgtgttaagcgtgggtaaacaaagccatgctatcagcaccgccagcggcgttggcgaacattttgctgataaaactgcgttaattacgcgtcttaaattactgattgctgagcaacaggtaattacgattttagttaagggtagtcgtagtgccgccatggaagaggtagtacgcgctttacaggagaatgggacatgttaatataagctttacaggagaatgggacatgttagtttggctggccgaacatttggtcaaatattattccggctttaacgtcttttcctatctgacgtttcgcgccatcgtcagcctgctgaccgcgctgttcatcagtttgtggatgggcccgcgtatgattgctcatttgcaaaaactttcctttggtcaggtggtgcgtaacgacggtcctgaaagtcacttcagcaagcgcggtacgccgaccatgggcgggattatgatcctgacggcgattgtgatctccgtactgctgtgggcttacccgtccaatccgtacgtctggtgcgtgttggtggtgctggtaggttacggtgttattggctttgttgatgattatcgcaaagtggtgcgtaaagacaccaaagggttgatcgctcgttggaagtatttctggatgagcgtcattgcgctgggtgtcgccttcgccctgtaccttgccggcaaagacacgcccgcaacgcagctggtggtcccattctttaaagatgtgatgccgcagctggggctgttctacattctgctggcttacttcgtcattgtgggtactggcaacgcggtaaacctgaccgatggtctcgacggcctggcaattatgccgaccgtatttgtcgccggtggttttgcgctggtggcgtgggcgaccggcaatatgaactttgccagctacttgcatataccgtatctgcgacacgccggggaactggttattgtctgtaccgcgatagtcggggcaggactgggcttcctgtggtttaacacctatccggcgcaggtctttatgggcgatgtaggtagcctggcgttaggtggtgcgttaggcattatcgccgtactgctacgtcaggaattcctgctggtgattatggggggcgtgttcgtggtagaaacgctttctgtcatcctgcaggtcggctcctttaaactgcgcggacaacgtattttccgcatggcaccgattcatcaccactatgaactgaaaggctggccggaaccgcgcgtcattgtgcgtttctggattattagcctgatgctggttctgattggtctggcaacgctgaaggtacgttaatcatggctgattatcagggtaaaaatgtcgtcattatcggcctgggcctcaccgggctttcctgcgtggactttttcctcgctcgcggtgtgacgccgcgcgttatggatacgcgtatgacaccgcctggcctggataaattacccgaagccgtagaacgccacacgggcagtctgaatgatgaatggctgatggcggcagatctgattgtcgccagtcccggtattgcactggcgcatccatccttaagcgctgccgctgatgccggaatcgaaatcgttggcgatatcgagctgttctgtcgcgaagcacaagcaccgattgtggcgattaccggttctaacggcaaaagcacggtcaccacgctagtgggtgaaatggcgaaagcggcgggggttaacgttggtgtgggtggcaatattggcctgcctgcgttgatgctactggatgatgagtgtgaactgtacgtgctggaactgagcagcttccagctggaaaccacctccagcttacaggcggtagcagcgaccattctgaacgtgactgaagatcatatggatcgctatccgtttggtttacaacagtatcgtgcagcaaaactgcgcatttacgaaaacgcgaaagtttgcgtggttaatgctgatgatgccttaacaatgccgattcgcggtgcggatgaacgctgcgtcagctttggcgtcaacatgggtgactatcacctgaatcatcagcagggcgaaacctggctgcgggttaaaggcgagaaagtgctgaatgtgaaagagatgaaactttccgggcagcataactacaccaatgcgctggcggcgctggcgctggcagatgctgcagggttaccgcgtgccagcagcctgaaagcgttaaccacattcactggtctgccgcatcgctttgaagttgtgctggagcataacggcgtacgttggattaacgatagcaaagcgaccaacgtcggcagtacggaagcggcgctgaatggcctgcacgtagacggcacactgcatttgttgctgggtggcgatggtaaaagcgcggactttagcccactggcgcgttacctgaatggcgataacgtacgtctgtattgtttcggtcgtgacggcgcgcagctggcggcgctacgcccggaagtggcagaacaaaccgaaactatggaacaggcgatgcgcttgctggctccgcgtgttcagccgggcgatatggttctgctctccccagcctgtgccagccttgatcagttcaagaactttgaacaacgaggcaatgagtttgcccgtctggcgaaggagttaggttgatgcgtttatctctccctcgcctgaaaatgccgcgcctgccaggattcagtatcctggtctggatctccacggcgctaaagggctgggtgatgggcagccgggaaaaagataccgacagcctgatcatgtacgatcgcaccttactgtggctgaccttcggcctcgcggcgattggctttatcatggtgaccagcgcgagtatgcccatagggcaacgcttaaccaacgatccgttcttcttcgcgaagcgtgatggtgtctatctgattttggcgtttattctggcgatcattacgctgcgtctgccgatggagttctggcaacgctacagtgccacgatgctgctcggatctatcatcctgctgatgatcgtcctggtagtgggtagcagcgttaaaggggcaagccgttggatcgatctcggtttgctgcgtatccagcctgcggagctgacaaaactgagcctgttttgctatatcgccaactatctggtgcgtaaaggcgacgaagtacgtaataacctgcgcggcttcctgaaaccgatgggcgtgattctggtgttggcagtgttactgctggcacagccagaccttggtacggtggtggtgttgtttgtgactacgctggcgatgttgttcctggcgggagcgaaattgtggcagttcattgccattatcggtatgggcattagtgcggttgtgttgctgatactcgccgaaccgtaccgtatccgccgtgttaccgcattctggaacccgtgggaagatccctttggcagcggctatcagttaacgcaaagcctgatggcgtttggtcgcggcgaactttgggggcaaggtttaggtaacagcgtacaaaaactggagtatctgccggaagcgcacactgactttattttcgccattatcggcgaagaactggggtatgtcggtgtggtgctggcacttttaatggtattcttcgtcgcttttcgcgcgatgagcattggccgtaaagcattagaaattgaccaccgtttttccggttttctcgcctgttctattggcatctggtttagcttccaggcgctggttaacgtaggcgcggcggcggggatgttaccgaccaaaggtctgacattgccgctgatcagttacggtggtagcagcttactgattatgagcacagccatcatgatgctgttgcgtattgattatgaaacgcgtctggagaaagcgcaggcgtttgtacgaggtagtcgatgagtggtcaaggaaagcgattaatggtgatggcaggcggaaccggtggacatgtattcccgggactggcggttgcgcaccatctaatggctcagggttggcaagttcgctggctggggactgccgaccgtatggaagcggacttagtgccaaaacatggcatcgaaattgatttcattcgtatctctggtctgcgtggaaaaggtataaaagcactgatagctgccccgctgcgtatcttcaacgcctggcgtcaggcgcgggcgattatgaaagcgtacaaacctgacgtggtgctcggtatgggaggctacgtgagtggtccaggtggtctggccgcgtggagcttaggcattccggttgtacttcatgaacaaaacggtattgcgggcttaaccaataaatggctggcgaagattgccaccaaagtgatgcaggcgtttccaggtgctttccctaatgcggaagtagtgggtaacccggtgcgtaccgatgtgttggcgctgccgttgccgcagcaacgtttggctggacgtgaaggtccggttcgtgtgctggtagtgggtggttctcagggcgcacgcattcttaaccagacaatgccgcaggttgctgcgaaactgggtgatagtgtcactatctggcatcagagcggcaaaggtagccaacaatccgttgaacaggcgtatgccgaagcggggcaaccgcagcataaagtgacggaatttattgatgatatggcggcggcgtatgcgtgggcggatgtcgtcgtttgccgctccggtgcgttaacggtgagtgaaatcgccgcggcaggactaccggcgttgtttgtgccgtttcaacataaagaccgccagcaatactggaatgcgctaccgctggaaaaagcgggcgcagccaaaattatcgagcagccacagcttagcgtggatgctgtcgccaacaccctggccgggtggagccgagaaaccttattaaccatggcagaacgcgcccgcgctgcatccattccggatgccaccgagcgagtggcaaatgaagtgagccgggttgcccgggcgtaattgtagcgatgccttttgcatcgtatgaatttaagaagttaatggcgtaaagaatgaatacacaacaattggcaaaactgcgttccatcgtgcccgaaatgcgtcgcgttcggcacatacattttgtcggcattggtggtgccggtatgggcggtattgccgaagttctggccaatgaaggttatcagatcagtggttccgatttagcgccaaatccggtcacgcagcagttaatgaatctgggtgcgacgatttatttcaaccatcgcccggaaaacgtacgtgatgccagcgtggtcgttgtttccagcgcgatttctgccgataacccggaaattgtcgccgctcatgaagcgcgtattccggtgatccgtcgtgccgaaatgctggctgagttaatgcgttttcgtcatggcatcgccattgccggaacgcacggcaaaacgacaaccaccgcgatggtttccagcatctacgcagaagcggggctcgacccaaccttcgttaacggcgggctggtaaaagcggcgggggttcatgcgcgtttggggcatggtcggtacctgattgccgaagcagatgagagtgatgcaagcttcctgcatctgcaaccgatggtggcgattgtcaccaatatcgaagccgaccacatggatacctaccagggcgactttgagaatttaaaacagacttttattaattttctgcacaacctgccgttttacggtcgtgcggtgatgtgtgttgatgatccggtgatccgcgaattgttaccgcgagtggggcgtcagaccacgacttacggcttcagcgaagatgccgacgtgcgtgtagaagattatcagcagattggcccgcaggggcactttacgctgctgcgccaggacaaagagccgatgcgcgtcaccctgaatgcgccaggtcgtcataacgcgctgaacgccgcagctgcggttgcggttgctacggaagagggcattgacgacgaggctattttgcgggcgcttgaaagcttccaggggactggtcgccgttttgatttcctcggtgaattcccgctggagccagtgaatggtaaaagcggtacggcaatgctggtcgatgactacggccaccacccgacggaagtggacgccaccattaaagcggcgcgcgcaggctggccggataaaaacctggtaatgctgtttcagccgcaccgttttacccgtacgcgcgacctgtatgatgatttcgccaatgtgctgacgcaggttgataccctgttgatgctggaagtgtatccggctggcgaagcgccaattccgggagcggacagccgtagcctgtgtcgcacaattcgtggacgtgggaaaattgatcccattctggtgccggatccggcgcgggtagccgagatgctggcaccggtattaaccggtaacgacctgattctcgttcagggggctggtaatattggaaaaattgcccgttctttagctgaaatcaaactgaagccgcaaactccggaggaagaacaacatgactgataaaatcgcggtcctgttgggtgggacctccgctgagcgggaagtttctctgaattctggcgcagcggtgttagccggactgcgtgaaggcggtattgacgcgtatcctgtcgacccgaaagaagtcgacgtgacgcaactgaagagcatgggctttcagaaagtgtttatcgcgctacacggtcgcggcggtgaagatggtacgctgcaggggatgctcgagctgatgggcttgccttataccggaagcggagtgatggcatctgcgcttagtatggataaactacgcagcaaacttctatggcaaggtgccggtttaccggtcgcgccgtgggtagcgttaacccgcgcagagtttgaaaaaggcctgagcgataagcagttagcagaaatttctgctctgggtttgccggttatcgttaagccgagccgcgaaggttccagtgtgggaatgagtaaagtagtagcagaaaatgctctacaagatgcattaagattggcatttcagcacgatgaagaagtattgattgaaaaatggctaagtgggccggagttcacggttgcgatactcggtgaagaaattttaccgagtatacgtattcaaccgtccggaaccttctatgattatgaggcgaagtatctctctgatgagacacagtatttctgccccgcaggtctggaagcgagtcaagaggccaatttgcaggcattagtgctgaaagcatggacgacgttaggttgcaaaggatggggacgtattgacgttatgctggacagcgatggacagttttatctgctggaagccaataccagtccgggtatgaccagccacagcctggtgccgatggcggcacgtcaggcaggtatgagcttcagccagttggtagtacgaattctggaactggcggactaatatgagccaggctgctctgaacacgcgaaacagcgaagaagaggtttcttctcgccgcaataatggaacgcgtctggcggggatccttttcctgctgaccgttttaacgacagtgttggtgagcggctgggtcgtgttgggctggatggaagatgcgcaacgcctgccgctcagtaagctggtgttgaccggtgaacgccattacacacgtaatgacgatatccggcagagcatcctggcattgggtgagccgggtacctttatgacccaggatgtcaacatcatccagacgcaaatagaacaacgcctgccgtggattaagcaggtgagcgtcagaaagcagtggcctgatgaattgaagattcatctggttgaatatgtgccgattgcgcggtggaatgatcaacatatggtagacgcggaaggaaataccttcagcgtgccgccagaacgcaccagcaagcaggtgcttccaatgctgtatggcccggaaggcagcgccaatgaagtgttgcagggctatcgcgaaatggggcagatgctggcaaaggacagatttactctgaaggaagcggcgatgaccgcgcggcgttcctggcagttgacgctgaataacgatattaagctcaatcttggccggggcgatacgatgaaacgtttggctcgctttgtagaactttatccggttttacagcagcaggcgcaaaccgatggcaaacggattagctacgttgatttgcgttatgactctggagcggcagtaggctgggcgcccttgccgccagaggaatctactcagcaacaaaatcaggcacaggcagaacaacaatgatcaaggcgacggacagaaaactggtagtaggactggagattggtaccgcgaaggttgccgctttagtaggggaagttctgcccgacggtatggtcaatatcattggcgtgggcagctgcccgagccgtggtatggataaaggcggggtgaacgacctcgaatccgtggtcaagtgcgtacaacgcgccattgaccaggcagaattgatggcagattgtcagatctctagcgtatatctggcgctttctggtaagcacatcagctgccagaatgaaattggtatggtgcctatttctgaagaagaagtgacgcaagaagatgtggaaaacgtcgtccataccgcgaaaagcgtgcgtgtgcgcgatgagcatcgtgtgctgcatgtgatcccgcaagagtatgcgattgactatcaggaagggatcaagaatccggtaggacttagcggcgtgcggatgcaggcaaaagtgcacctgatcacatgtcacaacgatatggcgaaaaacatcgtcaaagcggttgaacgttgtgggctgaaagttgaccaactgatatttgccggactggcaagtagttatagcgtattgacggaagatgaacgtgaactgggtgtctgcgtcgtcgatatcggtggtggtacaatggatatcgccgtttataccggtggggcattgcgccacactaaggtaattccttatgctggcaatgtcgtgaccagtgatatcgcttacgcctttggcacgccgccaagcgacgccgaagcgattaaagttcgccacggttgtgcgctgggttccatcgttggaaaagatgagagcgtggaagtgccgagcgtaggtggtcgtccgccacggagtctgcaacgtcagacactggcagaggtgatcgagccgcgctataccgagctgctcaacctggtcaacgaagagatattgcagttgcaggaaaagcttcgccaacaaggggttaaacatcacctggcggcaggcattgtattaaccggtggcgcagcgcagatcgaaggtcttgcagcctgtgctcagcgcgtgtttcatacgcaagtgcgtatcggcgcgccgctgaacattaccggtttaacggattatgctcaggagccgtattatagcacggcggtgggattgcttcactatgggaaagagagtcatcttaacggtgaagctgaagtagaaaaacgtgttacagcaagtgttggcagctggatcaagcgactcaatagttggctgcgaaaagagttttaatttttatgaggccgacgatgattacggcctcaggcgacaggcacaaatcggagagaaactatgtttgaaccaatggaacttaccaatgacgcggtgattaaagtcatcggcgtcggcggcggcggcggtaatgctgttgaacacatggtgcgcgagcgcattgaaggtgttgaattcttcgcggtaaataccgatgcacaagcgctgcgtaaaacagcggttggacagacgattcaaatcggtagcggtatcaccaaaggactgggcgctggcgctaatccagaagttggccgcaatgcggctgatgaggatcgcgatgcattgcgtgcggcgctggaaggtgcagacatggtctttattgctgcgggtatgggtggtggtaccggtacaggtgcagcaccagtcgtcgctgaagtggcaaaagatttgggtatcctgaccgttgctgtcgtcactaagcctttcaactttgaaggcaagaagcgtatggcattcgcggagcaggggatcactgaactgtccaagcatgtggactctctgatcactatcccgaacgacaaactgctgaaagttctgggccgcggtatctccctgctggatgcgtttggcgcagcgaacgatgtactgaaaggcgctgtgcaaggtatcgctgaactgattactcgtccgggtttgatgaacgtggactttgcagacgtacgcaccgtaatgtctgagatgggctacgcaatgatgggttctggcgtggcgagcggtgaagaccgtgcggaagaagctgctgaaatggctatctcttctccgctgctggaagatatcgacctgtctggcgcgcgcggcgtgctggttaacatcacggcgggcttcgacctgcgtctggatgagttcgaaacggtaggtaacaccatccgtgcatttgcttccgacaacgcgactgtggttatcggtacttctcttgacccggatatgaatgacgagctgcgcgtaaccgttgttgcgacaggtatcggcatggacaaacgtcctgaaatcactctggtgaccaataagcaggttcagcagccagtgatggatcgctaccagcagcatgggatggctccgctgacccaggagcagaagccggttgctaaagtcgtgaatgacaatgcgccgcaaactgcgaaagagccggattatctggatatcccagcattcctgcgtaagcaagctgattaagaattgactggaatttgggtttcgaggctctttgtgctaaactggcccgccgaatgtatagtacacttcggttggataggtaatttggcgagataatacgatgatcaaacaaaggacacttaaacgtatcgttcaggcgacgggtgtcggtttacataccggcaagaaagtcaccctgacgttacgccctgcgccggccaacaccggggtcatctatcgtcgcaccgacttgaatccaccggtagatttcccggccgatgccaaatctgtgcgtgataccatgctctgtacgtgtctggtcaacgagcatgatgtacggattagtaccgtagagcacctcaatgctgctctcgcgggcttgggcatcgataacattgttatcgaagttaacgcgccggaaatcccgatcatggacggcagcgccgctccgtttgtatacctgctgcttgacgccggtatcgacgagttgaactgcgccaaaaaatttgttcgcatcaaagagactgttcgtgtcgaagatggcgataagtgggctgaatttaagccgtacaatggttttagcctggatttcaccatcgattttaaccatccggctattgattccagcaaccagcgctatgcgatgaacttctccgctgatgcgtttatgcgccagatcagccgtgcgcgtacgttcggtttcatgcgtgatatcgaatatctgcagtcccgtggtttgtgcctgggcggcagcttcgattgtgccatcgttgttgacgattatcgcgtactgaacgaagacggcctgcgttttgaagacgaatttgtgcgtcacaaaatgctcgatgcgatcggtgacttgttcatgtgtggtcacaatattattggtgcatttaccgcttataaatccggtcatgcactgaataacaaactgctgcaggctgtcctggcgaaacaggaagcctgggaatatgtgaccttccaggacgacgcagaactgccgttggccttcaaagcgcctagtgctgtactggcataacgacatttatactgtcgtataaaattcgactggcaaatctggcactctctccggccaggtgaaccagtcgtttttttttgaattttataagagctataaaaaacggtgcgaacgctgttttcttaagcacttttccgcacaacttatcttcattcgtgctgtggactgcaggctttaatgataagatttgtgcgctaaatacgtttgaatatgatcgggatggcaataacgtgagtggaatactgacgcgctggcgacagtttggtaaacgctacttctggccgcatctcttattagggatggttgcggcgagtttaggtttgcctgcgctcagcaacgccgccgaaccaaacgcgcccgcaaaagcgacaacccgcaaccacgagcctagtgccaaagttaactttggtcaattggccttgctggaagcgaacacacgccgcccgaatagcaactattccgttgattactggcatcaacatgccattcgcacggtaatccgtcatctttctttcgcaatggcaccgcaaacactgcccgttgctgaagaatctttgcctcttcaggcgcaacatcttgcattactggatacgctcagcgcgctgctgacccaggaaggcacgccgtctgaaaagggttatcgcattgattatgcgcattttaccccacaagcaaaattcagcacgcccgtctggataagccaggcgcaaggcatccgtgctggccctcaacgcctcacctaacaacaataaacctttacttcattttattaactccgcaacgcggggcgtttgagattttattatgctaatcaaattgttaactaaagttttcggtagtcgtaacgatcgcaccctgcgccggatgcgcaaagtggtcaacatcatcaatgccatggaaccggagatggaaaaactctccgacgaagaactgaaagggaaaaccgcagagtttcgtgcacgtctggaaaaaggcgaagtgctggaaaatctgatcccggaagctttcgccgtggtacgtgaggcaagtaagcgcgtctttggtatgcgtcacttcgacgttcagttactcggcggtatggttcttaacgaacgctgcatcgccgaaatgcgtaccggtgaaggaaaaaccctgaccgcaacgctgcctgcttacctgaacgcactaaccggtaaaggcgtgcacgtagttaccgtcaacgactacctggcgcaacgtgacgccgaaaacaaccgtccgctgtttgaattccttggcctgactgtcggtatcaacctgccgggcatgccagcaccggcaaagcgcgaagcttacgcagctgacatcacttacggtacgaacaacgaatacggctttgactacctgcgcgacaacatggcgttcagccctgaagaacgtgtacagcgtaaactgcactatgcgctggtggacgaagtggactccatcctgatcgatgaagcgcgtacaccgctgatcatttccggcccggcagaagacagcagcgaaatgtataaacgcgtgaataaaattattccgcacctgatccgtcaggaaaaagaagactccgaaaccttccagggcgaaggccacttcagcgtggacgaaaaatctcgccaggtgaacctgaccgaacgtggtctggtgctgattgaagaactgctggtgaaagagggcatcatggatgaaggggagtctctgtactctccggccaacatcatgctgatgcaccacgtaacggcggcgctgcgcgctcatgcgctgtttacccgtgacgtcgactacatcgttaaagatggtgaagttatcatcgttgacgaacacaccggtcgtaccatgcagggccgtcgctggtccgatggtctgcaccaggctgtggaagcgaaagaaggtgtgcagatccagaacgaaaaccaaacgctggctagcatcaccttccagaactacttccgtctgtatgaaaaactggcggggatgaccggtactgctgataccgaagctttcgaatttagcagtatctacaagctggataccgtcgttgttccgaccaaccgtccaatgattcgtaaagatctgccggacctggtctacatgactgaagcggaaaaaattcaggcgatcattgaagatatcaaagaacgtactgcgaaaggccagccggtgctggtgggtactatctccatcgaaaaaagcgagctggtgagtaacgaactgaccaaagccggtattaagcacaacgtcctgaacgccaaattccacgccaacgaagcggcgattgttgctcaggcaggttatccggctgcggtgactatcgcgaccaatatggcgggtcgtggtacagatattgtgctcggtggtagctggcaggcagaagttgccgcgctggaaaatccgaccgcagagcaaattgaaaaaattaaagccgactggcaggtacgtcacgatgcggtactggaagcaggtggcctgcatatcatcggtaccgagcgtcacgaatcccgtcgtatcgataaccagttgcgcggtcgttctggtcgtcagggggatgctggttcttcccgtttctacctgagcatggaagatgcgctgatgcgtatttttgcttccgaccgagtatccggcatgatgcgtaaactgggtatgaagccaggcgaagccattgaacacccgtgggtgactaaagcgattgccaacgcccagcgtaaagttgaaagccgtaacttcgacattcgtaagcaactgctggaatatgatgacgtggctaacgatcagcgtcgcgccatttactcccagcgtaacgaactgttggatgtcagcgatgtgagcgaaaccattaacagcattcgtgaagatgtgttcaaagcgaccattgatgcctacattccaccacagagcctggaagaaatgtgggatattccggggctgcaggaacgtctgaagaacgatttcgacctcgatttgccaattgccgagtggctggataaagaaccagaactgcatgaagagacgctgcgtgagcgcattctggcgcagtccatcgaagtgtatcagcgtaaagaagaagtggttggtgctgagatgatgcgtcacttcgagaaaggcgtcatgctgcaaacgcttgactccctgtggaaagagcacctggcagcgatggactatctgcgtcagggtatccacctgcgtggctacgcacagaaagatccgaagcaggaatacaaacgtgaaagcttctccatgtttgcagcgatgctggagagcttgaaatatgaagttatcagtacgctgagcaaagttcaggtacgtatgcctgaagaggttgaggagctggaacaacagcgtcgtatggaagccgagcgtttagcgcaaatgcagcagcttagccatcaggatgacgactctgcagccgcagctgcactggcggcgcaaaccggagagcgcaaagtaggacgtaacgatccttgcccgtgcggttctggtaaaaaatacaagcagtgccatggccgcctgcaataaaagctaactgttgaagtaaaaggcgcaggattctgcgccttttttataggtttaagacaatgaaaaagctgcaaattgcggtaggtattattcgcaacgagaacaatgaaatctttataacgcgtcgcgcagcagatgcgcacatggcgaataaactggagtttcccggcggtaaaattgaaatgggtgaaacgccggaacaggcggtggtgcgtgaacttcaggaagaagtcgggattaccccccaacattttagcctatttgaaaaactggaatatgaattcccggacaggcatataacactgtggttttggctggtcgaacgctgggaaggggagccgtggggtaaagaagggcaacccggtgagtggatgagcctggtcggtcttaatgccgatgattttccgccagccaatgaaccggtaattgcgaagcttaaacgtctgtaagtcagataaggcgttttcgccgcatccgacattcgcacacgatgcctgatgcgacgctggcgcgtcttatcaggcctaaagggatttctaactcattgataaatttgtttttgtaggtcggataaggcgttcacgccgcatccgacatttgcacaagatgcctgatgcgacgctgtccgcgtcttatcaggcctacgtgcggcatcagacaaatgtcactgctttggttcttcgctccagtcatcgctttcggaaagatcgccactgctggggattcgtttttcttcagcagcccattctccgaggtcgatcagctgacaacgtttggagcaaaatggccgaaacgggctgatttcaccccacaccaccgttttcccgcaggttgggcaattcaccgtaatagtttcactcatttttactccttagcaacaggccagttcgaaatccagacgttccggtacctgtccgttttcagtgtccagcggcataaaacgaatggcaaaacggctcttatgtccggaaatttgcggataaagctgactatcgaggctcagattcaggcgcagcaagtcggcatcgccaccgttatcctgataaaaaccattcaggctggtttgtttacggaagggggcgctctggcgaattaaatccagcaccatggtaagtgcctgggtgagcgggttcaggctggcaatccaggtttctacctggctgtcgcgctgcgcctggggtagatgcagccaaatgtgcaatgtaggtaaatcaaagctgcaacagccgcctgggatgctcagtcgctgacgcaccagagcaatcaaacgatcttcacgcagaaattgcccgatacgcggcgcggaaattaatacgctccccgccgcttttaactgctgaattaatgcttcaatacggctctggtccacgccaggcacgccaatccaggtctggagtttacgttgctgccggtcaagttctttcaacagctcagtgcggacttcgccgcgctcgaaaacatccagtaattcactgacattacggaagaaatgcagcgcgccagcgtggtcaacgatgggtaaattaacggtgagttgctgaatcaaaaactcaatgcgcagccatgtacgcattttttcatttagtggatgttcaaaaaggacctgggtctgcattacggtttttcctgactgacaaactggctcgcaagctgcaaatagtgtgcgtgcaggcgggcaacatcgcttgcgatagcatccggtgcgccgttattatcaatgacgtcatctgccacggcaaggcgggcttcgcgcgttgcctgagcagcaaggatttgttcgacatgctcgcgagttacatcatcgcgctgcatggtgcgcttaagttgcgtttctgggctgacatccaccacaagcactcgattcgcttttttatacagactgttttctaccagcaatggcacaacccacagtacatagggggaagtagcttgctggatctggtgttgcgtctcttgctgaatcagcggatgcagcagggcgttaagccagtttttctcttccgggttggcgaagatccgctcgcgcaaggcccggcgctgcaatgttccatcagcagcaatcatgttagcgccaaagtgatcagcaatggcatgtagcgcaggtgcacctggttcaaccacctgacgcgcaataatatcggcatcaatgacgttaattccgagatcagcaaacgcattggcaacggtactcttgccactgccaatgcctcccgttaaggcaactatatacctcataatttatattcccgggaattcatcatgattatcaaaacgttaaaaatgagtgcacgaaagcgaaattgatgaaacgttcgctcactatttaccaggtaaatttatgggattgtagcgtaaaaaaagacaatttcgcagtcttgcgccgcattgattagtgcgtatgatagcgtcactggagttgcgctcttacccttatagccattaaccccaggaatccgcacatgcgtattgaagaagatctgaagttaggttttaaagacgttctcatccgccctaaacgctccactcttaaaagccgttccgatgttgaactggaacgtcaattcaccttcaaacatagtggtcagagctggtccggcgtgccgattatcgccgcaaatatggacaccgtaggcacattttctatggcctctgcgctggcttcttttgatattttgactgctgtgcataaacactattctgtcgaagagtggcaagcgtttatcaacaattcttccgctgatgtgctgaaacatgtgatggtttctaccggtacgtctgatgcggatttcgaaaaaactaaacagattctcgacctgaacccggcattaaacttcgtttgtattgacgtggcgaatggttattccgaacacttcgtgcagttcgttgcgaaagcgcgtgaagcgtggccgaccaaaaccatttgtgctggtaacgtagtgactggtgaaatgtgtgaggagcttatcctcagtggtgccgatatcgttaaagttggcattggcccaggttctgtttgtacaactcgcgtcaaaacaggcgtcggttatccgcaactttctgcggtaatcgaatgtgccgatgctgcgcacggtctgggcggaatgatcgtcagcgatggtggctgcaccacgccgggcgatgtggcgaaagcctttggcggcggtgccgatttcgtcatgcttggcggcatgctggcgggccacgaagagagcggcggtcgcatcgttgaggagaacggcgagaaatttatgctgttctacggcatgagctccgagtctgcgatgaaacgtcacgttggcggcgttgcggaatatcgcgcagcagaaggtaaaaccgttaagctgccgctgcgaggcccggttgaaaataccgcgcgagatattttgggcggcctgcgtagtgcttgtacatacgttggggctagtcgcctgaaagagctgaccaagcgcaccacgtttattcgtgtgcaggaacaagaaaaccgcatcttcaacaacctgtaatctcccaacgctggcgtggagcaacacgccagcgttatcccatcccactcatcgcatcgcctaaatggaaaattggcagatacattgccaccaccagcgtaccaataattcctcccgttatgatcagcaacgccggttccagtaaggctgcgaggttatccgccagcgccattgtgttttcccgatgatgatgggcgaggttgtctaacatgagatccagagagccggatgcctctcctgttctcactaattgcaaacagagcgggctaaactcaccggtattttttagcgccagccagatgggttgaccgttactgatatcgtgctggatttgtgtcagaagttgcacccagtacgggcagcgcattgtttctctgacgctctctacgccctgtaaaaaagtaatgcctgcactttgtgtcagcgccagaatcgtaaagatctgcgtgagtttttgtccccgcatcagactacccataatcgggatgcgtaacagcaatttctgccgcactataagccaggtcggtcggcgcatcagcaacttattggctatcgccagcagaaagccgaacaacaccagcagccagctccattcgccactaaagtctgccagcgtcatgatcccctgcgttagtgccggtagtggggtgttgaaggtcttatagatagcggcaaactccggcagaacaaaatgcagcattgccacaaccaccatgattgccatcgctaaaatgatgatgggataacgtaacgcacttttcactttgtcggtcaactgacgctgggctttttgctgacgcgccagttcaaagcagcattcatccagcttaccggtcagttcacccgtgcggatcatcgcctgatagagcggcggaaatacctcactccagggtaataaggcattggaaaaagcaatgccctgttcgagatcgtgcgccaggctttgcagcaacgcttgccattgcttactgggatgctgttccgccagcagagccagcccttcagaaagcgttaaccctgctttgagtagcgtcgccagttgatgaatgacttccgcgcttttatctcctcgccactgcgcagaattgatggcgattcgcttcaggcttagtggggtaaccatctgttgctgtagtgccataagcagtaaagtacggctctctgcccatagcatcccatcttgcgcattgccgtcgccggttatgccatgccagcgccagagttgcttactcgccatgcggcatccccagtacgcggattaactcttcaaaggtggttaagccttgctctacggccaggcagccgttttcaaaaagcgtacgcatacccgcctgtcgtgcgtgcgtttccaggctttcaacgtcggtattagcggaaataagctgacgaatgaccggcgttatgggcagaacttcaaataaggccgtacgaccataaaaaccgtggtagcaatgtacacaaccgggtgcctgccagtggggcagcgggcttggccatacattgtctggaatgtggatgggctccccttgctgccggcgacaatgtgggcaaagtttgcgtaccagacgctgggctattaccagcgtaagcgcgctacttagcatccagcgggcgacccccatttgctgtaaacgtaccagcgtttcgcaggtggaattagtgtgtagggtagacaacaccaggtgaccagtttgcgccgctttaatagcgatctctgctgtttcgccatcgcggatctctccgatcatgatgacgtcaggatcctggcgcaataacgcacgcaaaacgccctgaaaggtgagtccggcacgcggatggatttgcgtctggtttagtccggctatggggatctcaactggatcttcgacgctacaaatattaatgtcagcggtattcagcttttgcagggcactataaagcgtgaccgttttgccgctgccggtagggccagttaccagcaccagtccctgtggttgttgcaaggcatgagcaaagtccgccagttgtaacggctgcattccaagcgtgttgacatccagtgcctgacccacctgctgtaacaaccttaataccaccttttcaccaccccgacatggtaaggtcgcaatacgaaaactgacggcgtttcctgccagttcgacagtgaattgcccgtcctgcggcaggcgatgttccgcaatatccaggtttcccagcacttttaatctggcggttaatgcgactccggcatccggactaacatccggtaaaggatgcaatacgccgtcgatacgcaagcggatgcggtaggcattgtccgctggttcgatatgaatatcagacgcgcgttgttccagcgcagattgtaacgttcgagttagcaactctgctttgggctgatgcttctcctgaacagctacgggcagtgtctgttgtgtgcgactggcgtgaccttccatttgttggcgcgtccagcaggtgatctcaatacgtttggtggtagcgaaatgcaatgcgtccagtagctcatggctaggtgcatcgactaccgcaacatgaaccacctcttcgctggcatccagcaagactccatgataacgcagacacagggcagtgagctgtggaatattcattgccgctccttagttggcgtcatcaaagcggaagacatcttcgcaggcttgctgcaatgcgctgtcactttgaatattgcagttgcgcgtccagccggtgacgccgtttgcgttatcccaacccggtgtcatgacgacgcttagcccattgagactttcttgcccggtcaggctcaccacgccctttgccacactcatggcactaacatagcgggtggtggtagggctgggaatgccattgctgccaccgtcgcaggtatctaatccaccatgttccagcgcgcacaactctacggcggtacggtaaggcacaaaggtttgtagcatgtcggtgagtgcggctttgcgcaggtagttttgataagcgggaataccaatggcgcttaaaatggcaatgatgccaataaccaccatcagttcgataagtgtaaaaccgcgttgcttgtccatctgtttcgctccttgatttggttggcgctactttggcaaacgccatcagcacaggcgaggggcaaaaaacgaaacgggaaagcagattccgaggttttttatttcgttgcagcgaaagacaagaaatttgcgaggcgttacgaagaaagttggggaaggggagattatccgcccgcgatggagcggataaatctgtcaactattagcgaaaacgcatactaaggtcgagtgcttgtacgtgtttagttagcgcaccgacggagataaagtccacgcccgtttcggcaaattcacgcagtgttttgtcagtgacgttgccagacacttccagtagcgccttgccgttggtgcgtttgacggcttcgcgcatctgttctgtttcgaagttatccagcatgatgatatcggctcctgctttcagggcttcatcaagttcttccagattctctacttcgacttctactggcgcatccgggtgcagccaggacgctttttcgaccgcctggcgcacactgccggaggcaataatatggttttctttgatcaggaaggcatcagaaagccccagacggtgattcgctccgccgccgcaaagtaccgcgtatttcagagcactacgcaggccgggtaaggttttgcgcgtatccaacaactgcgtgttggtgccttccagcaattcgacatagtggcgtaccttactggcaactccactaagggtttgcacaaaattaagcgcagtgcgttcgcccgttaacagcacgcgggatgggccttcaagttcgaacaaggattgattggcattgatgacatcgccgtcatccacatgccagattatggtgacatcgtcgcctgccagttgaataaacacctcttcaacccagcgtttgccgcaaaagacgccattctcgcgggtgatcaccgtggcatgagagcgagaattttccggtaaaagttttgccgtaatatcattgttggcatcgactgttccgcctaaatcttcccgcagcgcctgggccaccgcgccggggatatcgagattaatgcgttccagcagctcgtcacgtcgggtgtcagggttatagcggcgaggcggcatgttaaaactccagatagctaacgaatcataaggtagaaacatgctactctgaaccgggtattagcaccacatataaggagatcctgcatgttgttagaacaggggtggctggttggcgcgcgccgcgttcccagtccacattacgattgccgcccggatgacgaaacacccaccctgctggtggtgcacaatattagcctgccgccaggcgagtttggcggtccgtggatcgacgcattattcactggaactattgatccgcaggcacatcctttctttgctgagatcgcccatttgcgcgtctccgctcactgtttgattcgccgtgatggtgaaatagtccagtatgttcctttcgataaacgtgcatggcatgcgggagcctctcagtatcaggggcgcgaacgctgcaatgatttttctattgggattgagcttgaaggcaccgatacgctggcgtataccgatgcgcagtatcaacagcttgcggcggttacgcgggcactgattgattgctatccggatatcgctaaaaacatgacgggccattgtgatattgcgccggatcggaaaaccgatcccggtcctgcatttgattgggcacggtttcgtgtgctggtcagcaaggagacaacatgacgctatttacaaccttactggtgttaattttcgagcgcctgtttaagttgggcgagcactggcagcttgatcatcgtcttgaagcgttctttcggcgggtgaaacatttttctctcgggcgcacgttaggcatgaccattattgcgatgggcgtgacttttttactgttacgcgcattgcagggagtattgttcaacgttcccacgctactggtgtggctgctgattggtttgctgtgtattggcgcaggtaaagttcgtcttcattatcatgcttatctgacagctgctagtcgtaatgatagccatgcccgtgccacgatggctggcgaactcaccatgattcacggcgtcccggcaggctgcgacgaacgtgagtatttgcgtgagctgcaaaatgcattgctgtggattaactttcgtttttatcttgcaccgctgttctggctgattgtggggggaacctggggacccgttacgctgatggggtatgcgtttttgcgtgcatggcaatactggctggcgcgatatcagacgccgcatcatcgtttacagtccggcattgatgccgtgcttcatgtactggattgggtgccggttcgtcttgcgggtgtggtatatgccttgatcggtcatggtgagaaagcgttaccggcctggtttgctagcctgggtgatttccatactagccagtatcaggtgttaacgcgtctggcgcagttctctctggcgcgtgaaccgcatgtcgataaggtggagacgccgaaggcagcggttagtatggcgaagaaaaccagcttcgtggtcgtggtggtgattgcactactgacgatttacggggcgttggtgtaaagattattgccctcaccctgtacgggtgagggcgtagagagattaatgcgcttttacggctttggcggttttctctttaaacagatagccgatacctaacacgatcagccataccgggatcaggtatacgctaatcgccattcctggggtcatcagcataatcaccagtaccgccgccataaacagcaggcagatccagttacccagcggataaagcagagcagggaagcgagttaccacgccttgttcctgcttggcgcgacggaatttcatatgcgccaggctaatcatcgcccagttgattaccagtgcagataccaccagcgccattaacagtccgaaagcggactctggggcaaggtagttaatcagtacgcacaacgccgttaccagtgcagacaccagaatggtatttactggtacaccacgtttatcgacagacgccagcgcttttggcgcattaccctgttgtgccagaccaaacagcatacggctgttgcaatatacgcagctgttgtacacggagagcgccgcagtcagtaccacgatgttcagcgcattcgccacaaaggtatcgcctaactcgtggaagatcagcacaaacggactggtatcggcggtaacgcgggtccacggcatcagactgagcagaacggctaagctaccaatatagaaaatcaggatgcggtagataacctggttagttgctttcggtatactttgctccgggttatcagcttctgctgcggtgatccccaccagttccagaccaccgaagctgaacatgataatcgccatcatcatcaccagcccggtgaagccgtgcggcaggaaaccaccctgatcccacaggttgctaacggtcgcctgcgggccgccgttgccactgaatagcagccagccgccgaagatgatcatcgctaccaccgcgataactttgataatggcaaaccagaactccatctcgccaaacactttaacgttggtcaggttgatggcgttaatcaccacaaagaatacggcggcagaaacccaggtggggatttccggataccagaactgaatgtatttacccacggcagtcagctcagccatggcaactaaaacgtacagtacccagtagttccagccagaggcgaaaccggcaaaactgccccagtatttataagcaaagtggctaaaggagcctgcgacaggttcttcgaccaccatttcacccagctgacgcatgatcagaaaggcgataaaaccagcaatggcgtaacccaggataatccctggccctgcggactgtattacggaggcgctacccaggaataacccggtccctatcgcgccacccagcgcgataagctgaatatggcggtttttaaggccgcgctttagctgctcgccgtgctgttgaccttccatcatgaaacctcgtgcggtggttgtttttttgatctacgcagtgatgcgtgtgtaagtttgcaattccgtttgttgtattaatttgtttacatcaaagaagtttgaattgttacaaaaagacttccgtcagatcaagaataatggtatgcggcagcgaatgcacccgctttatgcatggttgaagatgagttgcttaaaaagaaaccgtttgtaaagctcagcctcaacccctctcaatatgtagaatgaatttaaattcgttttaattgaattaaaaatcacaaaattggtaagtgaatcggttcaattcggatttttatagtttaataatcgttaaaaaactcctttcctacgtaaagtctacatttgtgcatagttacaactttgaaacgttatatatgtcaagttgttaaaatgtgcacagtttcatgatttcaatcaaaacctgtatggacataaggtgaatactttgttactttagcgtcacagacatgaaattggtaagaccaattgacttcggcaagtggcttaagacaggaactcatggcctacagcaaaatccgccaaccaaaactctccgatgtgattgagcagcaactggagtttttgatcctcgaaggcactctccgcccgggcgaaaaactcccaccggaacgcgaactggcaaaacagtttgacgtctcccgtccctccttgcgtgaggcgattcaacgtctcgaagcgaagggcttgttgcttcgtcgccagggtggcggcacttttgtccagagcagcctatggcaaagcttcagcgatccgctggtggagctgctctccgaccatcctgagagtcagtatgacttgctcgaaacacgacacgccctggaaggtatcgccgcttattacgccgcgctgcgtagtaccgatgaagacaaggaacgcatccgtgaactccaccacgccatagagctggcgcagcagtctggcgatctggacgcggaaagtaacgccgtactccagtatcagattgccgtcaccgaagcggcccacaatgtggttctgcttcatctgctaaggtgtatggagccgatgttggcccagaatgtccgccagaacttcgaattgctctatagccgtcgcgagatgctgccgctggtgagtagtcaccgcacccgcatatttgaagcgattatggccggtaagccggaagaagcgcgcgaagcaagccatcgccatctggcctttatcgaagaaattttgctcgacagaagtcgtgaagagagccgccgtgagcgttctctgcgtcgtctggagcaacgaaagaattaatgatttttctggtaaaaattatccagaagatgttgtaaatcaagcgcatataaaagcgcggcaactaaacgtagaacctgtcttattgagctttccggcgagagttcaatgggacaggttccagaaaactcaacgttattagatagataaggaataacccatgagtgaacgtttcccaaatgacgtggatccgatcgaaactcgcgactggctccaggcgatcgaaagcgtcatccgtgaagaaggtgttgagcgtgctcagtatctgatcgaccaactgcttgctgaagcccgcaaaggcggtgtaaacgtagccgcaggcacaggtatcagcaactacatcaacaccatccccgttgaagaacaaccggagtatccgggtaatctggaactggaacgccgtattcgtagtgctatccgctggaacgccatcatgacggtgctgcgtgcgagcaaaaaagacctcgaactgggcggccatatggcgtccttccagtcttccgcaaccatttatgatgtgtgctttaaccacttcttccgtgcacgcaacgagcaggatggcggcgacctggtttacttccagggccacatctccccgggcgtgtacgctcgtgctttcctggaaggtcgtctgactcaggagcagctggataacttccgtcaggaagttcacggcaatggcctctcttcctatccgcacccgaaactgatgccggaattctggcagttcccgaccgtatctatgggtctgggtccgattggtgctatttaccaggctaaattcctgaaatatctggaacaccgtggcctgaaagatacctctaaacaaaccgtttacgcgttcctcggtgacggtgaaatggacgaaccggaatccaaaggtgcgatcaccatcgctacccgtgaaaaactggataacctggtcttcgttatcaactgtaacctgcagcgtcttgacggcccggtcaccggtaacggcaagatcatcaacgaactggaaggcatcttcgaaggtgctggctggaacgtgatcaaagtgatgtggggtagccgttgggatgaactgctgcgtaaggataccagcggtaaactgatccagctgatgaacgaaaccgttgacggcgactaccagaccttcaaaagcaaagatggtgcgtacgttcgtgaacacttcttcggtaaatatcctgaaaccgcagcactggttgcagactggactgacgagcagatctgggcactgaaccgtggtggtcacgatccgaagaaaatctacgctgcattcaagaaagcgcaggaaaccaaaggcaaagcgacagtaatccttgctcataccattaaaggttacggcatgggcgacgcggctgaaggtaaaaacatcgcgcaccaggttaagaaaatgaacatggacggtgtgcgtcatatccgcgaccgtttcaatgtgccggtgtctgatgcagatatcgaaaaactgccgtacatcaccttcccggaaggttctgaagagcatacctatctgcacgctcagcgtcagaaactgcacggttatctgccaagccgtcagccgaacttcaccgagaagcttgagctgccgagcctgcaagacttcggcgcgctgttggaagagcagagcaaagagatctctaccactatcgctttcgttcgtgctctgaacgtgatgctgaagaacaagagcatcaaagatcgtctggtaccgatcatcgccgacgaagcgcgtactttcggtatggaaggtctgttccgtcagattggtatttacagcccgaacggtcagcagtacaccccgcaggaccgcgagcaggttgcttactataaagaagacgagaaaggtcagattctgcaggaagggatcaacgagctgggcgcaggttgttcctggctggcagcggcgacctcttacagcaccaacaatctgccgatgatcccgttctacatctattacagcatgttcggcttccagcgtattggcgatctgtgctgggcggctggcgaccagcaagcgcgtggcttcctgatcggcggtacttccggtcgtaccaccctgaacggcgaaggtctgcagcacgaagatggtcacagccacattcagagcctgactatcccgaactgtatctcttacgacccggcttacgcttacgaagttgctgtcatcatgcatgacggtctggagcgtatgtacggtgaaaaacaagagaacgtttactactacatcactacgctgaacgaaaactaccacatgccggcaatgccggaaggtgctgaggaaggtatccgtaaaggtatctacaaactcgaaactattgaaggtagcaaaggtaaagttcagctgctcggctccggttctatcctgcgtcacgtccgtgaagcagctgagatcctggcgaaagattacggcgtaggttctgacgtttatagcgtgacctccttcaccgagctggcgcgtgatggtcaggattgtgaacgctggaacatgctgcacccgctggaaactccgcgcgttccgtatatcgctcaggtgatgaacgacgctccggcagtggcatctaccgactatatgaaactgttcgctgagcaggtccgtacttacgtaccggctgacgactaccgcgtactgggtactgatggcttcggtcgttccgacagccgtgagaacctgcgtcaccacttcgaagttgatgcttcttatgtcgtggttgcggcgctgggcgaactggctaaacgtggcgaaatcgataagaaagtggttgctgacgcaatcgccaaattcaacatcgatgcagataaagttaacccgcgtctggcgtaagaggtaaaagaataatggctatcgaaatcaaagtaccggacatcggggctgatgaagttgaaatcaccgagatcctggtcaaagtgggcgacaaagttgaagccgaacagagcctgatcaccgtagaaggcgacaaagcctctatggaagttccgtctccgcaggcgggtatcgttaaagagatcaaagtctctgttggcgataaaacccagaccggcgcactgattatgattttcgattccgccgacggtgcagcagacgctgcacctgctcaggcagaagagaagaaagaagcagctccggcagcagcaccagcggctgcggcggcaaaagacgttaacgttccggatatcggcagcgacgaagttgaagtgaccgaaatcctggtgaaagttggcgataaagttgaagctgaacagagcctgatcaccgtagaaggcgacaaggcttctatggaagttccggctccgtttgctggcaccgtgaaagagatcaaagtgaacgtgggtgacaaagtgtctaccggcagcctgattatggtcttcgaagtcgcgggtgaagcaggcgcggcagctccggccgctaaacaggaagcagctccggcagcggcccctgcaccagcggctggcgtgaaagaagttaacgttccggatatcggcggtgacgaagttgaagtgactgaagtgatggtgaaagtgggcgacaaagttgccgctgaacagagtctgatcaccgtagaaggcgacaaagcttctatggaagttccggcgccgtttgcaggcgtcgtgaaggaactgaaagtcaacgttggcgataaagtgaaaactggcagcctgattatgatcttcgaagttgaaggcgcagcgcctgcggcagctcctgcgaaacaggaagcggcagcgccggcaccggcagcaaaagctgaagccccggcagcagcaccagctgcgaaagcggaaggcaaatctgaatttgctgaaaacgacgcttatgttcacgcgactccgctgatccgccgtctggcacgcgagtttggtgttaaccttgcgaaagtgaagggcactggccgtaaaggtcgtatcctgcgcgaagacgttcaggcttacgtgaaagaagctatcaaacgtgcagaagcagctccggcagcgactggcggtggtatccctggcatgctgccgtggccgaaggtggacttcagcaagtttggtgaaatcgaagaagtggaactgggccgcatccagaaaatctctggtgcgaacctgagccgtaactgggtaatgatcccgcatgttactcacttcgacaaaaccgatatcaccgagttggaagcgttccgtaaacagcagaacgaagaagcggcgaaacgtaagctggatgtgaagatcaccccggttgtcttcatcatgaaagccgttgctgcagctcttgagcagatgcctcgcttcaatagtagcctgagcgaagacggtcagcgtctgaccctgaagaaatacatcaacatcggtgtggcggtggataccccgaacggtctggttgttccggtattcaaagacgtcaacaagaaaggcatcatcgagctgtctcgcgagctgatgactatttctaagaaagcgcgtgacggtaagctgactgcgggcgaaatgcagggcggttgcttcaccatctccagcatcggcggcctgggtactacccacttcgcgccgattgtgaacgcgccggaagtggctatcctcggcgtttccaagtccgcgatggagccggtgtggaatggtaaagagttcgtgccgcgtctgatgctgccgatttctctctccttcgaccaccgcgtgatcgacggtgctgatggtgcccgtttcattaccatcattaacaacacgctgtctgacattcgccgtctggtgatgtaagtaaaagagccggcccaacggccggcttttttctggtaatctcatgaatgtattgaggttattagcgaatagacaaatcggttgccgtttgttgtttaaaaattgttaacaattttgtaaaataccgacggatagaacgacccggtggtggttagggtattacttcacataccctatggatttctgggtgcagcaaggtagcaagcgccagaatccccaggagcttacataagtaagtgactggggtgagggcgtgaagctaacgccgctgcggcctgaaagacgacgggtatgaccgccggagataaatatatagaggtcatgatgagtactgaaatcaaaactcaggtcgtggtacttggggcaggccccgcaggttactccgctgccttccgttgcgctgatttaggtctggaaaccgtaatcgtagaacgttacaacacccttggcggtgtttgcctgaacgtcggctgtatcccttctaaagcactgctgcacgtagcaaaagttatcgaagaagccaaagcgctggctgaacacggtatcgtcttcggcgaaccgaaaaccgatatcgacaagattcgtacctggaaagagaaagtgatcaatcagctgaccggtggtctggctggtatggcgaaaggccgcaaagtcaaagtggtcaacggtctgggtaaattcaccggggctaacaccctggaagttgaaggtgagaacggcaaaaccgtgatcaacttcgacaacgcgatcattgcagcgggttctcgcccgatccaactgccgtttattccgcatgaagatccgcgtatctgggactccactgacgcgctggaactgaaagaagtaccagaacgcctgctggtaatgggtggcggtatcatcggtctggaaatgggcaccgtttaccacgcgctgggtagtcagattgacgtggttgaaatgttcgaccaggttatcccggcagctgacaaagacatcgttaaagtcttcaccaagcgtatcagcaagaaattcaacctgatgctggaaaccaaagttaccgccgttgaagcgaaagaagacggcatttatgtgacgatggaaggcaaaaaagcacccgctgaaccgcagcgttacgacgccgtgctggtagcgattggtcgtgtgccgaacggtaaaaacctcgacgcaggcaaagcaggcgtggaagttgacgaccgtggtttcatccgcgttgacaaacagctgcgtaccaacgtaccgcacatctttgctatcggcgatatcgtcggtcaaccgatgctggcacacaaaggtgttcacgaaggtcacgttgccgctgaagttatcgccggtaagaaacactacttcgatccgaaagttatcccgtccatcgcctataccgaaccagaagttgcatgggtgggtctgactgagaaagaagcgaaagagaaaggcatcagctatgaaaccgccaccttcccgtgggctgcttctggtcgtgctatcgcttccgactgcgcagacggtatgaccaagctgattttcgacaaagaatctcaccgtgtgatcggtggtgcgattgtcggtactaacggcggcgagctgctgggtgaaatcggcctggcaatcgaaatgggttgtgatgctgaagacatcgcactgaccatccacgcgcacccgactctgcacgagtctgtgggcctggcggcagaagtgttcgaaggtagcattaccgacctgccgaacccgaaagcgaagaagaagtaatttttcgtttgccggaacatccggcaattaaaaaagcggctaaccacgccgctttttttacgtctgcaatttacctttccagtcttcttgctccacgttcagagagacgttcgcatactgcactccgttgctcgttattcagcctgacagtatggttactgtcgtttagacgttgtgggcggctctcctgaactttctcccgaaaaacctgacgttgttcaggacttgcgctttgaacacgctggcgggcgttatcacgttgctgttgattcagtgggcgctgctgtactttttccttaaacacctggcgctgctctggacttgcggactgaatacgctcacgcgctgcgtctcttcgctgctggttctgcgggttagtctgcattttctcgcgaaccgcctggcgctgctcagggctggcggactgaatgcgctcacgcgctgcctctcttcgctgctggatcttcgggttagtctgcattctctcgcgaactgcctggcgctgctcagggctggcggactgataacgctgacgagcggcgtccttttgttgctgggtcagtggttggcgacggctgaagtcgtggaagtcgtcatagctcccatagtgttcagcttcattaaaccgctgtgccgctgcctgacgttgggtatctcgtgtaatgactggtgcggcgtgtgttcgttgctgaaactgatttgctgccgcctgacgctggctgtcgcgcgttggggcaggtaattgcgtggcgctcattccgccgttgacatcggtttgatgaaaccgctttgccatatcctgatcatgatagggcacaccattacggtagtttggattgtgccgccatgccatattcttatcagtaagatgctcaccggtgatacggttgaaattgttgacgtcgatattgatgttgtcgccgttgtgttgccagccattaccgtcacgatgaccgccatcgtggtgatgataatcatcattgtcatgatgatgatggtcatgatcgtcgtcgtcccagtcgatgctgctgaatagtgcgtacgtggtagcaacgcccatgctatagccgaatccgcgtacaaagctgtcaacaaacggttctccggctggtggtggcagataaaccggcggatacgcagtattggcccagttcccgtaaaccacggttgggttgtagttgggaatatagaccacatcaggattggcgggctcaatggaaatgacggttgttgccggctctgtaatgacggggttggcagttaaaactgtattggatggtatgacgggtgccgtgactgtctgttttaccggtacagctttcttcgttgtggtaataactttctgttcggtactactcttcaggctgccggtttgttgcgccagttgccgcaatcgctgtacgctgtccatcacgtcctgcggctgggccagaaaagcatcgcccaggttttgcacccattgcgggttttcgcccatcaatgccatcaattgtggaaaggccaccagacttttaacgctggcgtcccacggctggtcagataccgcctgaatagcagcatcgccttgtttaagtggattatcgtggctccattgcactgcttgagcaacgtttgtcggataggtacttgccatcagcacctggctaagtagggcgtcgggatacagcgcgacgggcgcgacccattgatctatttgtgcagtgctgaatgcggatttgacgacggcgggtgttacgggaggtgcggaaaccgttgcaggaaacgtaaccgcggcagcgtcagacacagccagttgtgtgctttgcggttccacaggcgcttccactgtgcggctttttatatatagcccggtagaggcggcacaaagcccggcactgcaaattagcgccagcacatggggtttaaacggcaaagtcattttcataattcggatctcaaggaaatcgcaatggtcggcgaactgccacccgcaggtgctgtgaatccgagtataaagaggcggtagtttaaattttgactaatcttgggattcgttgagaaaggtgattatcaccatgcgaattaacgaagtttttacggagggaaacaatctctagaccatccttaacgattcagccacttttttatgttgcttttttgtaaacagattaacacctcgtcaaaatcctgctattctgcccgttgcggtactgggcatttaccctacaaactgctgtctcacaggagcgtgaagagaatcgcctgccgcactatgacaatgagagcgaggagaaccgtcgtgctagaagaataccgtaagcacgtagctgagcgtgccgctgaggggattgcgcccaaacccctggatgcaaaccaaatggccgcacttgtagagctgctgaaaaacccgcccgcgggcgaagaagaattcctgttagatctgttaaccaaccgtgttcccccaggcgtcgatgaagccgcctatgtcaaagcaggcttcctggctgctatcgcgaaaggcgaagccaaatcccctctgctgactccggaaaaagccatcgaactgctgggcaccatgcagggtggttacaacattcatccgctgatcgacgcgctggatgatgccaaactggcacctattgctgccaaagcactttctcacacgctgctgatgttcgataacttctatgacgtagaagagaaagcgaaagcaggcaacgaatatgcgaagcaggttatgcagtcctgggcggatgccgaatggttcctgaatcgcccggcgctggctgaaaaactgaccgttactgtcttcaaagtcactggcgaaactaacaccgatgacctttctccggcaccggatgcgtggagtcgcccggatatcccactgcacgcgctggcgatgctgaaaaacgcccgtgaaggtattgagccagaccagcctggtgttgttggtccgatcaagcaaatcgaagctctgcaacagaaaggtttcccgctggcgtacgtcggtgacgttgtgggtacgggttctagccgtaaatccgccactaactccgttctgtggtttatgggcgatgatattccacatgtgccgaacaaacgcggcggtggtttgtgcctcggcggtaaaattgcacccatcttctttaacacgatggaagacgcgggtgcactgccaatcgaagtcgacgtctctaacctgaacatgggcgacgtgattgacgtttacccgtacaaaggtgaagtgcgtaaccacgaaaccggcgaactgctggcgaccttcgaactgaaaaccgacgtgctgattgatgaagtgcgtgctggtggccgtattccgctgattatcgggcgtggcctgaccaccaaagcgcgtgaagcacttggtctgccgcacagtgatgtgttccgtcaggcgaaagatgtcgctgagagcgatcgcggcttcagcctggcgcaaaaaatggtaggccgtgcctgtggcgtgaaaggcattcgtccgggcgcgtactgtgaaccgaaaatgacttctgtaggttcccaggacaccaccggcccgatgacccgtgatgaactgaaagacctggcgtgcctgggcttcagcgctgacctggtgatgcagtctttctgccacaccgcggcgtatccgaagccagttgacgtgaacacgcaccacacgctgccggacttcattatgaaccgtggcggtgtgagcctgcgtccgggtgacggcgtcattcactcctggctgaaccgtatgctgctgccggataccgtcggtaccggtggtgactcccatacccgtttcccgatcggtatctctttcccggcgggttctggtctggtggcgtttgctgccgcaactggcgtaatgccgcttgatatgccggaatccgttctggtgcgcttcaaaggcaaaatgcagccgggcatcaccctgcgcgatctggtacacgctattccgctgtatgcgatcaaacaaggtctgctgaccgttgagaagaaaggcaagaaaaacatcttctctggccgcatcctggaaattgaaggtctgccggatctgaaagttgagcaggcctttgagctaaccgatgcgtccgccgagcgttctgccgctggttgtaccatcaagctgaacaaagaaccgatcatcgaatacctgaactctaacatcgtcctgctgaagtggatgatcgcggaaggttacggcgatcgtcgtaccctggaacgtcgtattcagggcatggaaaaatggctggcgaatcctgagctgctggaagccgatgcagatgcggaatacgcggcagtgatcgacatcgatctggcggatattaaagagccaatcctgtgtgctccgaacgacccggatgacgcgcgtccgctgtctgcggtacagggtgagaagatcgacgaagtgtttatcggttcctgcatgaccaacatcggtcacttccgtgctgcgggtaaactgctggatgcgcataaaggtcagttgccgacccgcctgtgggtggcaccgccaacccgtatggacgccgcacagttgaccgaagaaggctactacagcgtcttcggtaagagtggtgcgcgtatcgagatccctggctgttccctgtgtatgggtaaccaggcgcgtgtggcggacggtgcaacggtggtttccacctctacccgtaacttcccgaaccgtctgggtactggcgcgaatgtcttcctggcttctgcggaactggcggctgttgcggcgctgattggcaaactgccgacgccggaagagtaccagacctacgtggcgcaggtagataaaacagccgttgatacttaccgttatctgaacttcaaccagctttctcagtacaccgagaaagccgatggggtgattttccagactgcggtttaaaaagtcagcgcacgcgctgcgcataaacgacacaatgcccggtgaatgagattcccgggcatttttttatttctaaaccatcgccgttccgctgtttttctccggtaaggctgcgataattacatcaatggcgcaatgcgatttcggtgcattgccgggagcagaggaacacactatggattacgaatttctgcgcgatattaccggagtggtaaaggtgcgtatgtccatggggcatgaagtggtcgggcactggtttaatgaagaggtgaaagaaaacctggccttgcttgatgaagtggaacaagcagcgcacgcactgaaaggtagcgaacggtcctggcaacgggcagggcatgaatacaccctgtggatggacggtgaagaggtgatggttcgcgccaatcaactggaattcgctggcgatgaaatggaagaggggatgaactactacgacgaagaaagcctgagcctatgcggcgttgaggattttctgcaggtcgtggcggcttaccgcaatttcgtgcagcagaagtaaataaatctggcggagcctgggagctccgccagagccgttaaacagctggcatattgcgcccgtaataaatctcgcgcatttctttccacagcgcagcggtaatttcctggcgctcgctgtcggttaagtcttccggtttggtgtggaacatgtagtgcttaaggtcgaactctttaagcaacatcttggtatggaagatattttcctgatagacgttcacatccaccatgtcatacagcgccttcatatcgtcagacataaagttctgaatgctattaatctcatggtcgataaagtgcttcataccgttaatgtcgcgggtaaaaccgcgcacgcgataatcaatggttacgatatcggactcaagctggtggatcaggtaattcagcgccttcagcggagaaatcacgccgcaggtagagacttcaatatcggcgcggaaggtacataaaccgccttcaggatgactttccgggtaggtatgtacgcaaatatgacttttatcaagatgggcaacgaccgtttctggcagtgggccggggtgttctgttttgtcgatgagtttcgggtcaaccggttcttcactcaccagaatagtgacgctggcaccctgtggttcgtaatcctggcgggcgatgttaagaatattagccccgataatggaacaggtttcactcaggatttcggtcagacggttggcattatagagttcatcgatataagcaatataaccgtcgcgctcttcggcagttttggcgtagcagatatcgtaaatacaaaaactcagacttttggtcagattattaaagccatgcagtttcagttttttcaatttcttatcttctccttaggacggctgactagccagtgcgtcttgcagatactgaggtaaggcaaaagctgccgtatggattgccggattgtaataacggcatttcaggccagaggcgagaaaacgcgcctgaataatttcggtactgagatggcgtaaggcgtcgttatctgtcgcccatgcaaaagtcatgataccgccgtaataggtcgggatcgccgcctgataaaagccaacgtcgctgaagtaatggctgagtttgcgatggctgtcgatggcttcttcctgctgtaaaaagcagacgccgttttgtgcgacgaagataccgccaggattcaggcaacgtttgcagccttcataaaatgcgctagtgaaaaggctttcgccgggaccgataggatcggtgcagtcggagataatgacatcaaaggtctggctggtttgattaacgaaattgacgccatcgtcgatcaccagcttaaagcgcggatcgtcgtagctaccggcgttatggttgggtagatactgacggcagaagcttacgacacccgcatcgatttccaccatcgtgatactctcaacgtttttatgtcgggttacttcacgcagcatggcaccgtcgccgccgccgataatcagcacatgtttcgcgtgaccatgggccagtagcggaacatgggtcatcatctcatgatagataaactcgtcgcgctcggtggtttgtactacgccatccagcgccattacgcgaccaaatgcagcgttctcaaaaatgatcagatcctggtgatcggtcttttcatgatacagaacgttatctaccgcaaagtactgcccaaactggtcgtgtagcgtttcatgccactgttttttttcggccatgggttgatacctcctttgttaacacccgtaaaaaaagggcgcaacataatagctaacattgaccgcggatgcacggtcaatatttctacaaaaaggtatcagggattatttgacgtaggcaagcaggcttaaggaatcgcgggccagggctttgcattttttagcgacgggaatgccaatgccgctgagatcgcggtagctgtcttcaccgagggctttcatgtcgaaggtgtcgtaattactgaggtcccactggttttgctgagcgaaaaagaccagtgcgcgacgaatttgcccgttaggtaagttctggtaaccacaatcgttcttcagaaagacaaaaactgccgttaaatcggccatatcttcggcttcagactcgctgagcgcgtaactgtttgcgcagacggccatcaggctgccgaataacactgttctgaaaaacgtcttcattgcttctaccaggggcttaaagaagataaacgttagcacactgcgagcgaggcgacgaccattattgtcgattaaattgtgtctgcggcttgaccttcccgtaaggggaaggactatgctcaacgtttgattttgtttcgcctgcttaagaataaggaaataactatgcaacgtcgtgatttcttaaaatattccgtcgcgctgggtgtggctagcgctttgccgctgtggagccgcgcagtatttgcggcagaacgcccaacgttaccgatccctgatttgctcacgaccgatgcccgtaatcgcattcagttaactattggcgcaggccagtccacctttggcgggaaaactgcaactacctggggctataacggcaatctgctggggccggcggtgaaattacagcgcggcaaagcggtaacggttgatatctacaaccaactgacggaagagacaacgttgcactggcacgggctggaagtaccgggtgaagtcgacggcggcccgcagggaattattccgccaggtggcaagcgcagcgtgacgttgaccgttgatcaacctgccgctacctgctggttccatccgcatcagcacggcaaaaccgggcgacaggtggcgatggggctggctgggctggtggtgattgaagatgacgagatcctgaaattaatgctgccaaaacagtggggtatcgatgatgttccggtgatcgttcaggataagaaatttagcgccgacgggcagattgattatcaactggatgtgatgaccgccgccgtgggctggtttggcgatacgttgctgaccaacggtgcaatctacccgcaacacgctgccccgcgtggttggctgcgcctgcgtttgctcaatggctgtaatgcccgtagcctcaatttcgccaccagcgacaatcgcccgctgtatgtgattgccagcgacggtggtctgctacctgaaccagtgaaggtgagcgaactgccggtgctgatgggcgagcgttttgaagtgctggtggaggttaacgataacaaaccctttgacctggtgacgctgccggtcagccagatggggatggcgattgcgccgtttgataagcctcatccggtaatgcggattcagccgattgctattagtgcctccggtgctttgccagacacattaagtagcctgcctgcgttacctagcctggaagggctgacggtacgcaagctgcaactctctatggacccgatgctcgatatgatggggatgcagatgctaatggagaaatatggcgatcaggcgatggccgggatggatcacagccagatgatgggccatatggggcacggcaatatgaatcatatgaaccacggcgggaagttcgatttccaccatgccaacaaaatcaacggtcaggcgtttgatatgaacaagccgatgtttgcggcggcgaaagggcaatacgaacgttgggttatctctggcgtgggcgacatgatgctgcatccgttccatatccacggcacgcagttccgtatcttgagtgaaaatggcaaaccgccagcggctcatcgcgcgggctggaaagataccgttaaggtagaaggtaatgtcagcgaagtgctggtgaagtttaatcacgatgcaccgaaagaacatgcttatatggcgcactgccatctgctggagcatgaagatacggggatgatgttagggtttacggtataaaaagaccgtattcggaaatatgcccggatctctccgggcattaaactgatgacaaacgcaaatctgcctgatgcgctacgcttatcaggcctacgctagctgtgcaatccattgattttgcacaattttgtaggctggataaggcgttcacgccgcatccggcatgaacaacgcgcacgttgtcagcaatctgagcaagtcttacttcacatcatccggcagcgcataagccacaatatagtcgcccatcttcgtaccaaaactaccgtgaccgcctgcggagatcaccacatactgcttaccattcacttcataggtcattggcgtagcctgaccacccgctggtaaacgaccctgccacagtttttcaccgttgctcatgttgtaagcgcgcaggtagttatctgccgtagcggcgataaacagcacgttacccgccgtggagattggcccgcccagcatcggcatacccatattgaacggcaccggaaccggcatcgggaacggcatactgtcctgcggcgtaccaatacgtttcttccacaccacttcattagttttcagatccagcgcgctgatataaccccatgctggctgtttacatggcagaccaaatggactgaggaacgggttgagcgtgacaccatacggtacaccgtactgtggctgaatgccggattccgtacccgtgcctttggcatctttcggctgctccatcgggttgccaggaccacgcgggatcagtttgctaacaaacggcagtgccattgggttggcaatcgccacttcacgatttggatcaacggaaatcccgccccattcgaacatccccaggttacccgggaagaccagcgtaccctgttcagatggcggggtgaaaatgccttcatagcgcatctggtggaacatcacgcggcacaccagttggtcaaacatggtggctccccacatatccgcaccgctcaaatctttcgtcggacggaagctcagttcagaaaacggttgagttggggttacgtaatcgcctttcgctgcaccttggggaaccggtttttccggtgccggaaccaccagttcgccattacgacgatcgagcacaaaaatgttgccggttttcgccggagcgtaaataactggcactttctgaccattaacggtgatgtccgccagcgtcggctgtgccggaagatccatgtcccacaggtcgtggtgaacggtctggtagctccacgccagtttcccggtagtggcattcagcgccagaatgctgctggcataacgttcctgttccggtgtgcggttaccgccccagatatccggcgtggtcacgcccatcggcagatagaccagatccagcttcgcgtcataggccgctggtgcccaggagtttgggctgttaaaggtaaaggtgtgttcgtcagacgggattgcgttcggatctttcgcgccgggatcaaaagcccacagcagctccccggtgttgacatcaaaaccacggatcacgccagacgtttcgcgggtactgaagttatcggtaacactaccggccatcacgatggttttatcggtgataatcggtgggctagtcggttcatacagacccggtttggtgtctggcatattgctttgcagattgagcacgcctttattggcgaaggtttcgcacagtttgccgttttcagcgttaatcgcaatcagtcgaccatcattgaccggaagaatgatacgacgcgggcaatccgccatcacttccgggctagcggtttctgctttggcttcatgataagagacaccacggcaggttacgtgctggaaagactcgttggttttcagctcaggatcgtaatgccatttctctttgccgctggcggcatcaagcgcaaacaggcgctggtgagcggtacacaggtaaagggtgtcgcccactttaatcggcgtcacttcattggtgatttcacccggatcgttcggctgcttcacatcgccagtacggaacacccaggcttctttcagattatggacgttatcggcgttaatttgtttcagcgggctaaagcgttgaccttcctgattacgaccataggcaggccagtcctgatcggctacgggggagatagcttcagcaggtgtggcatcggcgcttaaggtgccgttgatctcctgcggatcgttaaatccggcccaggtcaggataccaccgctaatcagcagtgcgaccaccagtgcggcaactgcgccgctggcaggaatgaccaggcgacgccagacaaacggcaggatcagccagatgccgaagaagaccagaatgtcgctgcgcggagtcagcgcccagaagtcgaaaccaacttcccagacgccccaaatcatggtgccgagcagcagggctgcgtatagccaaagcgcggcgcgtttactgcgccacagcatccaggcgacgccgagcatcacaaggccagcgatagggtagtaccaggagccgccaatcgcgaccagccagcctccgccaatgagtagatacagcccgcaaagcgctgcaaaaagggctgttagcgtgacgagtaatcgtcggctgcctgtattgttaattgccataaagagacaccatttcaattcattaatattttagtagcaattaattataggttttaacatgtgtgatcgtcatcacaattcgagctttattaacagattccgcgaatgaatagttttactggtatactgcgtgtcttgcgctttgttgcggtgccaaaacctgcccgtgcgaagtgatttgtttttaaatcatatggttagagatatgaaacatactgtagaagtaatgatccccgaagcggagattaaagcgcgtatcgccgaactgggtcgtcagattactgagcgttacaaagacagcggcagcgatatggtgctggtgggtctgctgcgtggcagttttatgtttatggcggacctgtgccgtgaagttcaggtatctcatgaagtcgactttatgaccgcctccagctacggtagcggcatgtccaccacccgtgatgtgaaaatcctcaaagatctggatgaagatatccgtggcaaggacgtgctgattgttgaagatatcatcgacagcgggaatacactgagcaaagtgcgtgagatcttaagcctgcgcgaaccgaagagcctggcgatttgtacgctgctggataaaccgtcccgtcgtgaagtgaacgtcccggtagaatttatcggtttcagcatcccggatgagtttgtggtgggttacggcattgattacgcacagcgttaccgtcatctgccgtatatcggcaaagtgattctgctggacgagtaagtgtgaagttgccggatgtgttgcatccggcatggcatttttatttgtggttggcgtgtttcagcttgaggttggaaatcccgtgacggtaacgttgctcaagggtttcgcggttggtggcggtaacatccagatcacgcagcaagccgtcgtgaatgccgtaggcccagccgtgaatggtaactttctgcccgcgtttccacgcactttgcataatggtggagtggcccaggttatacacctgttccatgacgttcagttcacacaaggtatccagacggcgctcttgcggcatttcgccgagcaaactgctatgtttgaaccagatatcgcggatatgcagcagccagttgttgataagccccagttccgggttttcaactgcggcttgtacgccgccgcaaccgtagtggccacagataataatgtgttcaacttcgagtacatccactgcatactgaaccacggaaaggcagttcaggtcagtgtgaatgaccaggttagcaacattacggtgaacaaagagttcgcccggttcaagaccggttaaacgttctgcaggaacgcgactgtcggaacatccaatccatagaaagcgcggtttttgcgcttgtgccagtttctcaaaaaacccgggatcctcttccaccagcattttactccatagtgcattgttgctgatgagtgtatctatgtctttcatggaggttaacgacctgtaaccaaataattacgtttggctaatatagggcaactccgggacgatttaaaccacagataaagtgtaagaacgtaaggtaagtaaaaatttatgaccattgcactggaacttcaacagcttaaaaaaacctatccaggcggcgttcaggcgcttcgtgggatagatttgcaggtcgaagcgggtgatttttatgcgcttctcgggccgaacggggccgggaaaagcaccactatcggtattatcagctctctggtaaataaaacctccgggcgggtcagcgtatttggttacgatctcgagaaggatgtcgtgaacgctaaacgtcagttgggactggtgccgcaggaatttaacttcaacccgtttgaaaccgtgcagcaaattgtggtgaatcaggcagggtactacggcgtggagcgcaaagaagcgtacatccgcagcgaaaagtatcttaaacaactcgatctatggggaaaacgcaacgaacgtgcgcgtatgttatctggcgggatgaagcgccgtttaatgattgcccgtgcgttaatgcatgaacctaaactactgattctcgacgaaccgaccgcaggcgtggatattgaacttcgccgcagtatgtggggctttttgaaggatttaaacgacaaaggcaccaccatcattctcaccacacactacctggaagaagcagaaatgctgtgccgcaatatcggcattattcaacacggtgagctggtggaaaataccagcatgaaggcgctgctggcgaagctgaaaagcgaaacctttattctcgatctcgcaccgaaaagcccgttaccgaagctcgatggctatcagtatcgactggtcgataccgcgacgctggaagttgaagtgctgcgtgagcaggggatcaacagcgtatttacgcagttaagtgagcagggcattcaggtattaagtatgcgtaacaaagctaaccgtctggaagagctgtttgttagtctggttaatgaaaaacaaggagatcgcgcatgatgcatctttactgggtggcgctaaaaagcatctgggcgaaagagatccatcgctttatgcgtatctgggtgcagacgctggtgccgccagtcatcaccatgaccctttactttattatcttcggtaacctgattggtagccgtattggcgatatgcatggcttcagctatatgcagttcatcgtaccggggctgatcatgatgagcgtgatcaccaatgcctacgccaacgttgcgagtagtttttttggtgccaagttccagcgtaatattgaagagctgctggtagcgccggttccgactcacgtcattattgccggatatgtcggcggtggcgtggcgcgtggtctgtttgttggcattctggtgacggcaattagtctgttttttgtgccatttcaggtgcatagctgggtattcgttgccttaacgctggtgctcacggcggtgttgttctcccttgcgggtttgctgaacggtgtgtttgccaaaacgttcgatgacatcagcctggtgccaacctttgtgttaacgccactcacgtatttgggcggggtcttttacagtctgactttgttgccgccgttctggcaagggctgagccacctgaacccaatcgtttatatgatcagtggtttccgctacggcttcctcggtatcaatgatgttccgctggtcactacctttggcgtactggtggtctttattgtggcgttttatttgatctgttggagcctgatccaacgtggacgtggtttgcgtagctaaggctatttcctctcctctggatttgggggagaggagttttgacggctatcaccctttatcaacaatggtcagggtagactgattttcggctaaggaggaaggcgatgttaggttgggtaattacctgtcacgatgaccgggcgcaagagatactggatgcgctggagaaaaaacatggggcacttcttcagtgccgggccgtgaatttctggcgcggattaagctctaatatgctcagccgcatgatgtgcgatgctctgcatgaagcggactctggtgagggtgtcatcttcttaaccgatatagccggagcgccaccgtatcgcgtggctagtttattaagccacaaacactcccgttgcgaagtgatttctggtgtcacgttaccgttaattgaacagatgatggcttgccgtgaaaccatgaccagtagtgagtttcgcgagcgtattgtcgaactgggtgcgccggaggtgagtagtctttggcaccaacaacaaaaaaatccgcctttcgtcctcaaacataatttgtatgagtattaacccgcgattctgatggcgcttttgctacaataaaagcgttgtttcaccctcggttattttttcatgtacaaacaagctgttattctcctgctgatgctgtttaccgcaagtgtcagtgccgcgttacctgcccgttatatgcaaaccatcgaaaatgctgcggtctgggcgcaaattggtgacaagatggtgaccgtggggaatattcgggccggacaaatcattgccgtggagcccactgccgcaagttattacgcatttaattttggctttggcaaaggttttatcgataaaggtcatctcgagccggttcaggggcgacaaaaagttgaagacggtttgggcgacctcaacaagccgctgagtaatcagaacttagttacctggaaagatacgccggtctataacgcgccgagtgcgggaagtgcgccatttggggtactggcggacaatttgcgctacccgattttgcataaactgaaagacaggttaaatcaaacctggtatcagatccgtattggcgatcgactggcctatatcagcgcactggatgcccaacccgataatggcctgagcgtgctaacctatcaccatattctgcgcgacgaagaaaacacccgttttcgccatactagcacgaccacaagcgtacgcgctttcaataaccagatggcctggctgcgtgacaggggatacgcgacactgagcatggtgcagctggaaggctacgtgaagaataagatcaatctccctgcgcgagcggtggtgattacctttgatgatggcctcaagagcgtgagccgctatgcgtatcctgtgttgaaacaatatggcatgaaggcgacggcgtttattgttaccagtcgcatcaaacgtcacccgcagaagtggaacccaaaaagcctgcaatttatgagcgtttctgagcttaacgaaattcgcgatgtatttgatttccagagtcatacccattttttgcatcgggtagatggttatcgccgacccatattactgagccgtagtgagcacaatattctgtttgattttgcacgtagtcgccgcgctctggcgcaatttaatccgcatgtctggtatcttagctatccgtttggcggatttaatgacaacgccgtgaaggcagcaaacgatgccggatttcacctggcggtgacaaccatgaaaggcaaagtaaaaccgggggataatccgttgttactaaaacgactttatatcttaagaacggatagcctggagacgatgagccggctggtgagtaaccagccgcagggataacaatcaagcaacctgtaccggaatcgctttcgcggtacgtttcatttcattgtcgccttcaaaataggcgacgttgggtcgccaggtgcgagcttcttcatctggcatggtaacgaagctggcgatgatgacaatatcgccgacactggcgcagtgggccgccgcaccgttaacagaaataattctgctaccgcgttctgccgcgatggcataagtggagaaacgcttgccgttggtgacattccagatatcaatggcttcgttttcgagaataccggctgcgtcaagaaaatcctggtcaatggcgcaagaaccttcatagtgcaggtccgcatgagtcactttcacgcggtggagtttgccctgcagcatcgtgcgaatcataacttctacctttctaccctgtcgttaacgaagcaggcgatgcctgctttgaggaaattctcacgcagtattgcccgatttttgtttagtgtctactcatctgacggcatttgcgtcagcagtttgcgtaccgcgccgaagcgtgccatgtatcgcctgtaacgaattgatatttctctgaacgctgctcggtaaacaataaagaggtggctgacgatagcgcgccttgactggatactgccttcacgcaaagccacacggaagacagggaagatggatgcaccgagtaccacaccgcatgacgcggtatttaaacaatttttaatgcatgcggagacggctcgcgactttctggagatacatttgccagtggaattacgcgaactttgtgacctcaacacgcttcatttagagagcgggagtttcattgaagagagcctgaaaggacacagcacggacgtgctctattccgtgcaaatgcagggcaatcccggttatctgcatgttgtgattgaacaccaaagcaagccggataagaaaatggcctttcgcatgatgcgttattctatagccgccatgcaccggcatctggaggctgaccacgataagctgccgctggtggtgccgatactgttttatcagggcgaggccacaccttatccgctaagtatgtgctggtttgatatgttttacagcccggagctggcgcgacgcgtctataacagtcctttcccgctggtggatatcaccatcacaccggatgacgaaatcatgcaacatcggcggattgcgattctcgaactactgcaaaaacatattcgccagcgcgacttaatgttattgcttgagcaactggtcacgctgatcgacgaagggtacactagcggaagtcagttagttgccatgcaaaactatatgctgcaacgcggtcatactgaacaagcggatttgttttacggtgtgttgagagacagggaaacgggaggggagtctatgatgacgctggcgcagtggtttgaagagaaagggattgagaaggggattcagcagggaagacaggaagtaagtcaggaattcgcccagcgtcttctgagtaaaggaatgtctcgggaagacgttgcagagatggcaaatttacctcttgctgagattgataaggtaattaaccttatttaagttacctgtgttatgacagatgacgtggggtaaattaataactggcgccatcagccgtagcgccagttaagtattacgccagctcgaccattttgttgtcgatcaggcgagcatcgccaagccaggcggctaccagaattactgcccgtttgctggtttcagaaacttccagcaatgtgtcggcatcgcgaatctgaatatcatcggcgcggaagcctttttcattcagttcttgccccgcaatggtaataatttcatcgagatcccgttccccagcctgcaatttgtcagcaatgctacttaaaactttgtacagaccaggcgcaattttgcgttgttccgccgtcagataaccgttacgggaacttagcgccagaccgtctttggcgcgcataattggcacaccgacaatctcaatatcgaagcccatatcggcaaccattttgcggatcagcgccagttgctgaaaatctttttcaccgaagcaggcgatgtccggctggaccaggttgaacagcttgctgacaatagtgctaacgccgcgaaaatgtcccggacggctggcaccttccagcatggtgctaaggccaggaacgtcaacgtaagtgtgggtttcagtaccgttcgggtagatctcttttacgctaggggcgaaaactaaatccactttacgtttgtttagcttctcgcagtcctcctgcaaggtccgtggataacgagccagatcttccgggcggtcgaactgcatcgggttaacgaaaatactgacgacgaccacatcggcgcgggctttggcttcgtcgaccagcttcatatggccatcgtgcaggttacccatggtaggcaccagcgccacgcgcttgccttccatacgcaggcggcgaatttgctgacgcagcagcggcagggtttcgataattaacacaacgtgactccttaatggaaactgtgttcttcgcccggataaacgccggactccacttcagccatatactgccgcacagccgcgcggatgtcgcccgtttcggcgaggaaatttttagcgaatttaggaatgtgaccgccggtaataccaaaggcgtcgtgcatcacgaggatctgcccgtcagtgacgttgcctgcgccaatgccaataaccgggatcgccagtgcttcggtaatacgttttgccagttcaaccggcacgcattccagcaccagcagctgtgccccagcagcttctaaggctaatgcatcgctgagcagttgatcgcccgcttcatcgccgcgcccctgaactttgtagccaccgaaaatattcacactctgtggtgttaaacctaagtgaccacatacaggaacggcacgttcggtcagcatttgtacggtttctaccagccactcaccgccttcaattttgaccatgttagcaccggcacgcataaccgttgcggcgttttcgaaggcttgttccggcgtggcatacgccataaacggcaggtcagccagcagcaggcagtttggtgcgccgcgacgtacggcggcagtgtggtaggcgatatcggcaacggtaactggcagggtggagtcgtgcccctgaaccgtcatgcccaggctatcgcccaccagcatgacgttaagcccttcatcagcaaagagtttggcgaagctatagtcataagcggtgatggtcgcgaaacgttttttttcctgtttgtacttctgcagtaaggagatggtggtcggtttcataacgtatcctgataaattgatgttgtgctgtctggcattttatcagtcacattggtgggggcaatgatttatccgtagcagcactgccagaaggtgacagtgctgctacgttatcagggataggttacctggaaagtactggtggctttaaattcgccgggttcgatagcaatattcccgtcttgctttaatgttgcctggaaatgaagaggctgacttgtgccgttaccttgattagggtaaaccccatcggaggtgtcatcttcggtttcataatctatataaacagaattcgtatcattaggttttaatgtcattagcggatttttactggttgctaaaccttcaatgagtacgccaacgcctttggcggcagtgcttccagtaagcgtattaccaagcagttgtgtgttttgagtacctacttttccagtgacgagttttgtttcaatattacgcacacgaatacaattctgaaggctgatatcaaagggaacaggactagcgccatttttaattgtcccagagctatattctcccattctaaccgtactaccattgacacttggcccggtaagtatggaggtaaaacatgttggtaaggttaatttgacattattcagtgtgaaattgacataaatgtggttgctgtgatctacaacttttgtaccaggactgtaggccttaaagctataaaggtaattactactactggataactggacttgctgattaagtgtaggatcgaaattagtatctgtataaaattcaacagttatgttgtgtactataccaccaatagcccaaaacttatcgtagtcgtctgctttgttgcaacccttagtttgtagatcgctgtctgtgacggaaaagaaaaattcttggttggaaggatctccgatatagattcctgggctttgaatgtcagttattgtatcgtatgcagaccagaccctacttattaacatggtgtaatacagaccaggaacagatgtattaaatagtttatgtccgccataatctttaccactatagaccatggcattttcaatagttattggaccaggattcgctctgccagatgtattgcagtaaagaataccaccaccggtacctgtatccaggtaactccagtacatttttaccccagtcgggccgagctgcgtgggtttataaaaaaccaagttgcttgctgtacttgtgtaattaaaggtcatctgtgcggcagtggaggggcctcgatagttatcaactcctgcattatttcccacaataaaacttgtatatgcactgactgtattacaacaagaatacagtgctaaaaaaagaatgtacctgaagatagtcttcatttttactccaatgtttctttattgttatggtttgcgctgtttttgtttgttattcgtagtaaatatccactaacacatggctcataagttgaccagatgtaacactcaatgcaggatcgattttttgcattcgggtgctaaatttccaggaactaccattcatgtcatcgctcattactggataaacggaacgagatccgccactagcattaagaacattgaatgtattcgcgctatcctgagtagaaaatataactactcctacattacttgctccactgctaatttcattagcaaatatttgcctagagccagcagccatgacaccgctaagggctctaaaatcaatatgtaactgatttagcacatcgccagttccctgtaatgcacagtcggatacagtgatagtgaactcttttccacctggttgataactttcaggagtaacattaccactaaaatatcccaccccaacgacgccaagatcaatattaccctggttactgattccgcttttgcaggtgctgttttttacattggcaacaaggtcaatatcctgtccagcaatggctggacaggcgatgcaaaacagtaaactcagaaacagaattattctcttcatcagcttacgttgagtgggatgcatatatagttcctgaatctgtaagtctgttagttataggttactgtaaatgtggctggtgcagaaaacttacccgcagtgacattgtttacggttttatttttttccacgaccaggcgtgcactcatcggataataaacgaccgcattggctgcagtggagattgttacctcttgacttgctggtgttacacagctaaattgtgttgcactccctgttgccggagttacagtgctccagacttcaacggcgacagcacttgctttatctgcggctgtggaaccatttgcaaaccccgcaccgtcattagcagttccctcgcatgtggctcgcttggttaattttatttgcgcttttttattggggatacccgcacagtctttgaatttgagtttgaatgtttttactttggtcttggcattgatttcagaaatatatacatcaccaaaatcaacaacagaaatgtcctgatcagagtcatttactaatgtagcggtacaagtacccatttctacagtagtaataacggtcagtccaatactgtctgttgccgcataagagagtacgctgaacaaactggcagccaaaacgacactgctggataatccataacgtaaatttttaaatgtcatcataattatccttcttattgatagatgaaattaaacgtcgccagtgcacgaaaattccccggtacgccttgccctgcatctgtttcacgtagcgcaacggtcatttcaagacccttatcgggctgcatctcgtctgtgctccagcgtatcttttccgcactgttaggtttaaggaaagtggcatcatcagtagtccgttttttgaaacccataccgatattacttgtcgtgctagaactatcaccagactgcggtataataagcttaggactgctactacttgcatttccggtcagagtggtatcaatccaactgatgccactgctgcacccactggcaaccagtttaaaatcagcctgagattctgtcgttttattcgcgatcttatccagacccatcttagggattctcaatgtgtagttattattgccatcattcgtgacgttattaccagtaagtgtgatgttacaggttgtcgctttgacagtggctgtaaactctacattaatatccgttgcaaatacactgggacttaataatattcccatcagtatcactattttatgtggcgttgtttttatcatttgacgtcccttgtagttactgaatctgacaccgaattccattcagaataatagattgtgctattttttctgcttctgggctttgttgataatgcgcaagacaacttacgggtttactttgttcgagccatttaatgctgatatttccctgctgctcaataccacgaacaaatgcttgtccaccctgtccaacattaccaatgacattgccttgctcatcataaatatctgcagcaaatggaatatttttaccatcacttcgtgtgatgttcataatggcactttgcccttgcacggtttcaaaatcagcaaagacgacactaccctgacgcggtacagctactgcactggtactttttaattcaacatcgttctcaagatcgttgatatccagcgcgatacggttttcatgataaggagaaagagcgctggtgacaccataaccccatcgatcgatagtactgttgccataatttattcgcgctccttgagcacctggagcctgaactaccgccagtgtatcggagtcgctaaaactatcattactgaaagtcagtccaccgctatgcaatacaaaaccaccgtcggtgctgagagaaacttgacggctgttatcgctatttgcagaaatactacctgccagcgttccccatggactctcatagctggcataacccccaacataactcaaatctttgctggctttattcatcgtatagccagtattcacgctataactgacgcgagcgttatcgctatagccactgctgctaacgttgagttggttattacccttaaagtcactgcttatttgagtatcaatactctggaaaccactagtacgttgttcagtgccaagtaatttttcaattggaatggtgaaactaagataaacgctatcgtcagtgtcgccgtcttcattccaactacgctgggcactgacactgtagctgccccaggatgtactgttactgtagccaatagagtaattgctacgattttgtccggaagcccagtaatcggaccaacttccggaaagataaaaactaccgtaatcttttttctcaaatttcaacggttggttaatactgaccgtaacctgatttttcatgcgactgtaattacgcatggatttcggttcaagatcttgttcgggatgtttcacttcatcaattagagttagtgcatcattaagaccaaggtaattctgtgtgctatagcgataggccgcgatattcagactagtacttgtttcttcgaataacttgttccaggaaacacgataactttgcccctggtatgttttatcatccgggatacgaacattggaatgagtcacatcgaaagaaaatgcaccaacactagtattcagaccaagacctaacaaaccagcggtatagttattatcggttatctgaataccggtataacccgtcagatagttattcaggccgtagtagtagcttgcttgaaataaattaggctcatcctgaatatcatcttttaagacctgaccgccgctaatatcccaacgtccaacgccagggcgtaacatttgaacaacggaactgaaaggttggctgaatgtccgcttactgccatcggattcttcgatggtaacaataagatcgctgccgtacccactcggactcagatcatcaatgacgaaagcgcctggcggcaccgtcgtttcataaatcttatagccaccttgcgtaatagtgactttggcgttggtattggcaacgccatgaatgataggcgcaaagctggctaaagtcggaggcaacatgcggctgtcactgtataaacgaatgcctcggatactgacggaatcaaaggtttcgcccgtcgtataagactcaccaagaatgagttgagaacgcaggctggcgatatcacgctgaacataccgattcttaaaatcataattactgccagaatcggtcatccagttgtagttgccgctggcacgcagtcgccatgcacctaaattcatcccaccgttaaatgcagcataaatgctttcattttttcgaccaggggtttcactatgatatccgttgaggttgtaactcaacatggccgcattaatgccgttttcccataagcttggatcaacatagttttggtaatttttcattacccaggcttgaggaacgtctatatccagacgttgatcgttaacgtcataacgaacagaagcctgagggataatttccgtcaaattgaggcaattgccgagcgtttcatccctggcaagcagaacggctttttcgttatttatatcgggagaattaatatgaaactgcaataaattctttaatgtgatacaagcctgggcgttcttttttccttcaattgcgacaaatgtaatactttggttaatgattggttggtcgtttacataaacactgacgtcgtaaacacccggtatagcggggttaccttcactgtaccggctgagatcaatattagatgcattctgccccatcaggaaggtatggtcatattcaacgagttcagcactgaaagcagtattgcaatacagcagcgcgcaaaacgtggcgatacgggtcagatgatgataatttttagtatattctatagtcacgctatgcttcctgcggaattatatccttgcctgattacagcctggcattaccttcaattgcgccaccaaagtcattaatggcgtaaaaatgcacttttgcagaattcgctttgccattaaggccattgactttcatgacctcatcactaaatggtgcaatcattttcacatcaatcggatagcgtttaccgctagcttctaaatcaccactgctaaaagagacgtagtaaggggttggattggtcactcgtaaactcgccttaccttcactaccactccagaaccacttcagggctaacggggcttcagagggatttcccttcaatccatccgggcgatagaaaagttttatacgtgtgcgaaatgccagttgcagcaggctttgattcgcgaccttttctgcatctggttttggtggaacttccagtacgttaaaccagaacacgctctctctgtctttaggcagactggtgctggctgtgtacattaatttgattgtttgcccacgtttggcatcaatacggcttactggcggcgtagcagtaaaagggactgtaatactgccaggctcagcgttgtcatcgccagtatctaaccaactctggacaagcaacgggttattccctttattttccagacgtacgttgacacttttttgatcgcttttatatattacgcgagtaccgctaatgacaatgtccgcaatagagctactactaaaagccatacaggttacgaagcataaagctgttgtatgtttggtgttaaaaaacataaaccatccctgatagagttaattaaaacagggaataatataaaatagaaattattattccctgtatattcattcaatcaatttaactggtgaatacttactgataagtaatggtgtatgcagtgttagtttttacataaccagcagttgctgtttggtctgcgacggcacgaacgtaagacgctttaaaatcataaacagcagattttgtcgttgcatccagggctttagtatacacatcgccagggttgttaatttgaacctgtttgatagtggaaccatcaatattgtgtagagcgatattaacgccgtcagatgggttgttaatagacatgtcgttgttcaaagtccctttgctgttaccaaagaaaacagaaccgaaggtcattttagccgtgctacctggattcggatttgctttgctgcagtcaacggtgatgctgaaaggtttagctttagcgccaacggtgtcattcagtacgccagcatcgatttcaccaacggttgcggtttgcagcaggatcagaccatccttgttaccgccgtcaacgcgggtttcacaggtgttatcaacaaccagaccactgatatttaactgaccgccgtccatatcagcagaagcagtacctgcaaccatcgccagcataagaccagacagggcaaaacctaattttttagacataaaaatcctttaataaaattccattagtcagactacatgtttgaagaatgactattcatgacacaaataggagaaacaaatgttagatattaatgagcaatgatatttgttacccaaatttacaaccattgttcattaggtcgcctattgtgcactttagaagcttttgaacaaattaaatttacttaattcaaaattaagtaaaaataagttcacaagtgcaattggttagggtatggagatgggattgatatttatttataggaagttatattatttccgcaaagagatgtttaaactaaaatcgtaattaaggaaagagatgagatatgattttcagaaaatatttatattcgcaatataaataaattaccatttgtttaatttgtcaaatgctcttgtatgtaagatttgacgcaacatctccccatcaggaaacaccaactccggcgcgatttcaaacagcggccacagcataaatccacgattcttcatatcgtagtgcggaacggtcaggcgttcagtatttatcacttcattaccaaacagcatgatgtcgagatccagcgtgcgtggtccccagcgttcagctttgcggacgcgaccttgctgcaattcaatacgctgtgtgtgattgagtagctcttcaggtgcaagagaggtttccagcgccacggctgcgtttaagtaatcgggttgatcttgcggccccagcggtggggtgcggtaaaagctagaaacggtaagaatgtggctttcagggatatcgcctaatgctttcagggcagcattgacctgctccagcggagaggccagattgctgcctatggcaatatacgccactgtcatgcggtaccctcacgacgtggtgcgcgtttgcgtggacgacgagtacgacgacgcggactcggttcttcatccagctcgttgagcatccctttttggtctggtggcgcggaaacctggaactcaccccaccatttcaccagacgctgcagttcagcgttacgctcaacttcagctcgcaaggccaacaggtcataagccgcacggaacttaggatgctccagcagtttccatgcgcgtttaccctgacgacgggacatacgcaactgcaactgccagatatcgcgggttaatgtcgtcagacgtttcgggattgccagactacggcaggcttcgtccagcacgtcgttcatcgccagcgcgaaagcgtcgtgataggtcaggccgctttcctgggcgatcttctgtgccgtctccagcagtgggtaccagaacatggcggcaaacaggaacgccgggttcacgcgcatatcgttatggatacgcgtatcggtattcttcagcacctgttcaatgatccgctccatcgggctgtcgccattttccgtgaagtagcgggtaatggtcgggaacagcggctggaacagatgatattcacacaacagcttataggtttcgtaaccgtagcccgcttgtagcagtttaaggctttcttcaaacaggcgtgccggtgggatatcgttcagcagggtagcgaggcgagggatcggttctgcggtttccgggctgatgcgcatacccaatttggcggcaaaacgtaccgcgcgcagcatacgtaccggatcttcacggtagcgcgtttccgggttaccaatcagacggataacgccgtccttcagatccttcatgccgccaacgtaatcacggacggtaaaatccgctacgctgtaatacaggctgttgatagtgaaatcgcggcgctgggcgtcttcttcgatggagccgaaaatgttgtcgcgcagcaacatgccgttttgcccgcgttgggaggtcgtgcggtcgctgacgttaccttcgtggtgtccacggaaggtcgcaacttcgataatctccgggccaaacattacatgagccagacggaaacggcgacccaccaggcggcagttacggaacagtttgcgcacctgctcaggcgtggcgttagtggttacgtcaaaatctttcggctttttgccaagtaacaggtcgcgcacgccgccgccaaccagccaggcttcgtatcccgctttattgagcctgtacattaccttcagggcattttcactgatatctttgcgggaaatagcatactgctcacgcgggatcaccgtcacctgtggacgggcgactgcctgttcagcctcgctttcctcgcggcttagcaccttgcggcaaaaattagcgactcgggtaaaaatagtacacctcggtagtgtcaaacatcattcaggacaaaaaaatagcggctaatcatagctcagcaactcgcattactgaatgtactatttacaattgcgctctcgggcacggcggtaagccgccagtttttgacggcactctgaaggatttgctcgacgctgaaatcctgccagtgtgcttctgcctgctgccccagaaattgaagtgccgcgattagtaccgggcgtggatcgcctttcggcaacgcaggcgcatgattctgcttggaaagtttagcgccttgtggattaagcgccagcggcagatgaatgtaatctggcactttccagccaaaaagctggtacaggctgatttgccttactgttggttcaatcagatcagccccacgcactatttctgtaacgccctggaaatgatcatcaaccacaacagccaggttgtaggcgaacaacccatcacggcgatgaatgataaaatcttcccgtgccagtttttcgtcggcgtgaataatgccgcgcagctggtcagtaaattgcgtgaccggatgctgctggcggatacgcactgcggcgttgtctggtccatgatgcaacacccggcaatgaccgtcgtaaataccgccaatgctttgaatacgcgcacgcgtacaggtgcagtaataacttagtccttgttcatgtaaccaggcgagtgcttcacgataggcgtcgtgacgttggctttgccagagaacatcgccgtcccagtgcagaccgtaatgttccagctggcgcaggatagtttctgcggcaccgggaacttcacgaggcgggtcgatatcttctatgcgtaccagccagcgaccttgccgggcgcgagcctgcaaatagctgccgagcgcggcgatcagagagccaaaatgaagctcgccggaaggagagggggcgaagcggccaatatactgtgtgtctgtcatctctttgaacaaaaaataaggcgggagcatttcccgcctgtggtaaacgtgatggaacggctgtaattagccagccatctgtttttcgcgaatttcagccagcgttttgcagtcgatgcacagatcggctgtcgggcgcgcttccagacggcgaataccaatttcaacaccgcaggattcgcagtagccgaaatcttcgtcttccacttttttcagcgtcttctcgatctttttgatcagcttacgctcgcgatcgcggttacgcagttcgaggctgaactcttcttcctgggctgcacggtctaccgggtccgggaagttggctgcttcatcctgcatatgtgtaacggtgcgatcgacttcatccctgagttgattacgccatgcttccagaatacgacggaagtgcgccagctgggcttcattcatatactcttcgcccggcttctcctgatatggttccaccccagcgatggcgagaatactcagggagcttgttttacggttttgcccttcttgcatgttgcttctccttaacacgcactatcgatccccatgttcgggggaaaaatgaggccgctataaatagcagatgcttttccggatagcaattatctaaacgtaacacttgacaactgtgtgaggaaaagcgtatttgcgcacgcgaccagaatgtaaattaaccagttacttactttattacaatgtaaccggcagactttttttaagagccatgccttcagcagaaatttccgctttgtaagccagaatttctacccccctctgttgagcttcactcaatagttgcgcgtatttctcatcgatgtggcgcgcgggactaaaccgtgtaatggcactatgcagcacggcgaaaaagataaccgcacgctggccttcagccgctacgctcatcaactcccgaaggtgtttctgacctcgttcagtgaccgcatcgggaaaatatccctgttcgttctccgctaacgtaacgcttttcacttcaatatagcagtctggacggctatccgcctgcaacataaagtcaatacggctgcgttctgcgccgtattttacttcgcttttcaggctgctatagccactcagttcactaatactttcattaaggatagcctctttcgtcaacctgttagcccaaagcgtgttgacgcaaataaatgcgccgctctggctttgagttaattcccaggtgtgtgggtatttccgtttggtgttgtcactagtgctataccagacggtatcgccaggcgttgcacaaccggtcatcgcacccgtattcgggcagtgtagcgttaattcgcgaccatcgggtgtgatcacatcggctaaaaaacgtttgtaacgctgaattagcgtcgcgcgctgtagagggggagaaaattccattgcgacaatccttgttattgcgttagcgcccagcgttttagcggcgtgtagcgtgtgcgtccacgggcaaagctggaggcgtaaagggtgaactccgtcaccgcatagctccagttaaaacctggcggcgggattgtcaccgcctcgctggcgtcgcgcaataaggtaatatgtggatgaaacggacgattgctttgaaaacaaccgctgcgggcagcctgactacggagcatattcgccagctggattaagccgcgtggcggctgacgcatccctaaccacaccacacggctacgcagccattgtccggcgtcatcaagcgtgagtgtgaaaccaggttgacgaatccgtccggctaaaagagaaagcgccttctctttctcggcgctcacttcgcctaaaaatgccagagtcagatgcaaattatcggcggcgaccggacgtcccgcctcaggtgggaagtgtgtggcgcgccaatggataatctgttcgcggatttctgcaggtaagtcgatagcaaagaacagacgttgcggttcagacatgtgaggcactcggttatgaattaccgcgatgctacaatgtggcgcgaagaatgttaaccctctggagcgttttgtgagcagcttgcccgttgctgccgtcttacctgaattacttaccgctctcgattgtgcgccgcaggtattattaagtgcgccgaccggggccgggaaaagtacctggctgccgctgcaactgctggcgcatcccggcattaacgggaaaattatcctgctggagccgcgtcgtctggcggcgcgtaacgtcgcgcaacggctggcggagctgcttaacgaaaagccaggcgataccgttggctaccggatgcgtgcgcaaaactgcgtcgggccgaatacccgcctggaagtggttaccgaaggcgtgctgacgcgcatgatccagcgtgacccggaactgagcggtgttggactggtgatccttgatgaatttcatgagcgcagcttgcaggcggatttggcgttggcgctgttactcgatgtgcaacaaggtctgcgtgatgaccttaaactgctgattatgagcgctaccctggacaacgaccgcttgcagcaaatgctgccagaagcgcctgtcgtcatcagtgaagggcgcagctttccggttgaacgccgttatttaccgctgcccgcgcatcagcgttttgacgatgccgttgcggtagccaccgctgaaatgctgcgtcaggaaagcggaagtttactgttatttttacctggcgtcggagaaattcagcgtgtgcaggaacaactggctagccgcatcggcagtgatgtattgctctgcccgctgtatggcgcgttgagcctgaacgatcagcgaaaagcgatcctcccggcaccgcaagggatgcgcaaagtggtgctggcgaccaatattgctgaaaccagtttaaccattgaaggtattcgtctggtggtggattgtgcccaggagcgtgtggcgcgttttgatccgcgcacggggcttacgcgactgattactcaacgcgttagccaggcatccatgacgcagcgtgccgggcgcgccgggcgtctggagccgggtatcagcctgcatttaatcgccaaagaacaagcagaacgcgccgcggcgcaaagtgaaccggagatcttacaaagcgatctttccggtttgctgatggaattactgcaatggggatgcagcgatccggcgcagatgagctggctggatcaaccgccagtagtgaatctactggccgcgaaacgtctgttacaaatgctgggggcactggagggtgaacggcttagtgcgcaagggcaaaaaatggcagcgctgggtaacgatccgcgtttagcggcaatgctggttagcgcgaagaacgacgacgaagctgctaccgcggcaaaaattgccgccattctcgaagagccgccacggatgggcaatagtgacctgggcgtggcgtttagccgcaatcaaccagcctggcagcaacgtagtcagcaactgttaaaacgcttaaacgtacgtggcggtgaggcagacagtagccttatcgcgccgctacttgccggggcgtttgccgatcgcattgctcgtcgccgtgggcaagatggacgctatcaactggcaaacggcatgggagcgatgctcgatgccaacgacgcgctaagccgccacgaatggttgatcgcaccgttattattgcagggcagcgccagcccggatgcgcggattttactggcgctgctggtcgatattgatgagttagtacaacgctgcccgcagctggtacagcagtctgacactgtggagtgggatgacgcgcaaggtacgctgaaagcctggcgtcggctacaaatcggtcagttgacggtgaaagtgcagccgctggcgaaaccgagtgaagacgagttgcatcaggcgatgcttaatggcatccgtgataaaggtttaagcgtgctcaactggacggcggaagcggaacagctacgcttgcgtttgttatgcgccgcaaagtggttgccggaatatgactggccagcggttgatgatgaaagtttattggcagcgctggaaacgtggctgctgccacatatgactggcgtacatagtctacgcggcctgaaaagtctcgacatttatcaggcactacgcggattacttgattggggaatgcagcaacgtctggatagtgaattgcctgcgcattacactgtgccgacgggaagccggatcgccattcgttatcatgaagataacccgcccgcgctggcggtgagaatgcaagagatgtttggcgaggccaccaatccgacgatcgcccaggggcgcgtgccgctggtgctggagttgcttagtcctgcccaaaggccattacaaatcacacgagatttgagcgacttctggaaaggagcgtaccgtgaggtgcaaaaagagatgaaagggcgttatcccaaacatgtctggccggacgacccggcaaatactgcaccgacgcgacggacgaaaaagtatagctaaggttggttttctccctctccctgtgggagagggccggggtgagggcatcagcgcgcacgttcaccctcaccctaaccctctccctcaagggagaggggaccgatcgagcacaaattttgagagatatcttcttctgtcttgtaacagaagaacagaaaatcgggcttttgcgcctgaatattgcggagaaaaagcatggccgggaatgaccgcgagccaattggacgcaaagggaaaccgacgcgtccggtcaaacaaaaggtaagccgtcgtcgttacgaagatgacgatgattacgacgattatgatgactatgaggatgaagaaccgatgccgcgcaaaggtaagggcaaaggcaaagggcgtaagcctcgtggcaaacgcggctggctatggctactgctaaaactggctatcgtttttgccgtgctgatcgccatttacggcgtttatctcgatcaaaaaattcgtagccgtattgatggcaaggtctggcaactgcctgcggcagtttatggccgaatggtcaatcttgagccagacatgaccatcagcaagaacgagatggtgaagctgctggaggcgacccagtatcgtcaggtgagcaaaatgacccgtcctggcgaatttaccgtgcaggccaacagcattgagatgattcgccgtccgtttgatttcccggacagtaaagaaggacaggtgcgcgcgcgtctgacctttgatggcgatcatctggcgacgatcgtcaatatggagaacaaccgtcagttcggtttcttccgtcttgatccgcgtctgatcaccatgatctctagcccaaacggtgagcagcgtctgtttgtgccgcgcagtggtttcccggatttgctggtggatactttgctggcgacagaagaccgtcatttttacgagcatgatggaatcagtctctacagtatcggacgtgcggtgctggcaaacctgaccgccggacgcacggtacagggtgcgagtacgctgacgcaacagctggtgaaaaacctgttcctctccagcgagcgttcttactggcgtaaagcgaacgaagcttacatggcgctgatcatggacgcgcgttacagcaaagaccgtattcttgagctgtatatgaacgaggtgtatctcggtcagagcggcgacaacgaaatccgcggcttcccgctggcaagcttgtattactttggtcgcccggtagaagagctaagcctcgaccagcaggcgctgttagtcggtatggtgaaaggggcgtccatctacaacccgtggcgtaacccaaaactggcgctggagcgacgtaatctggtgctgcgtctgctgcaacagcaacagattattgatcaagaactctatgacatgttgagtgcccgtccgctgggggttcagccgcgcggtggggtgatctctcctcagccagcctttatgcaactggtgcgtcaggagctgcaggcaaaactgggcgataaggtaaaagatctctccggcgtgaagatcttcactacctttgacagcgtggcccaggacgcggcagaaaaagccgccgtggaaggcattccggcactgaagaaacagcgtaagttgagcgatcttgaaactgcgattgtggtcgtcgaccgctttagtggtgaagttcgtgcgatggtcggaggttctgagccgcagtttgcgggctacaaccgtgcgatgcaggcgcgtcgtagcattggttcccttgcaaaaccagcgacttatctgacggccttaagccagccgaaaatctatcgtctgaatacgtggattgcggatgcgccaattgcgctgcgtcagccgaatggccaggtctggagtccgcagaatgatgaccgtcgttatagcgaaagcggcagagtgatgctggtggatgcgttgacccgtagcatgaacgtgccgacggtaaatctggggatggcgctggggctgcctgcggttacggagacctggattaaactgggcgtaccgaaagatcagttgcatccggttccggcaatgctgctgggggcgttgaacttaacgccaatcgaagtggcgcaggcattccagaccatcgccagcggtggtaaccgtgcaccgctttctgcgctgcgtagcgtaatcgcggaagatggcaaagtgctgtatcagagcttcccgcaggcggaacgcgctgttccggcgcaggcggcgtatctgacactatggaccatgcagcaggtggtacaacgcggtacgggtcgtcagcttggggcgaaatacccgaacctgcatctggcagggaaaacagggactaccaacaataacgtagatacctggtttgcgggcattgacggcagcacggtgaccatcacctgggtcggccgtgataacaaccagccgaccaaactgtatggtgccagcggggcaatgagcatttatcagcgttatctggctaaccagacgccaacgccgctgaatcttgttccgccagaagatattgcagatatgggcgtggactacgacggcaactttgtttgcagcggtggcatgcgtatcttgccggtctggaccagcgatccgcaaagcctgtgccagcagagcgagatgcagcagcagccgagtggcaatccgtttgatcagtcttctcagccgcagcaacagccgcaacagcaacctgctcagcaagagcagaaagacagcgacggtgtagccggttggatcaaggatatgtttggtagtaattaacatctaagcgtgaaataccggatggcgagttgccatccggtaaaataacatcccatctaagatattaaccctttcttttcatctggttgtttattaacccttcaggaacgctcagattgcgtaccgcttgcctgtaagactcaatgtaagccgtgccaaaatatgatggctaggacgagctagaacccgccagcgtttcgaatattatcttatctttataataatcattctcgtttacgttatcattcactttacatcagagatataccattccatataacggccctgtacgcctggacggataaagcgtttacgcgacaacggatgcccgatgcgacgctggcgcgtcttatcgggcctacaaacggccccgaatcgtaggtcggataaggcgttcacgccgcatccgacaaaccatgctggatcacaacttcgcaaacacccgacgtgcagcatcgatggtgttattgatatcttccatgctgtgcgccacggacataaagcccgcttcaaacgcactcggtgccaggtaaacaccttcgtccagcatcatatggaagaaacgcttaaagcgttccacgtcacaggccatcacatcctgatagcacgtcacggactcggcgtcggtaaagaaaataccgaacatgccgccaacgtggttaacgaccagcggaattccggcttcttctgccgcttccagcagaccttctgccagacgtgttgtcagctcatccagcgtttcgtgaacgcccggctgcgcgacttcattcagacaggcgaaacccgctgccatcgcaatcgggttaccggaaagcgtacccgcctgatagaccggacccgtcggggccagcgcatccattacatcacgacgaccaccgaatgcgcctaccggcattccaccgccgatgattttgccgaggcaggttaaatctggcactacgccgtaataatcctgtgcgccagctagcgctacgcggaaaccggtcatcacttcatcgatgatcagcaacgcgccaaattcgtcgcacagcgcgcgcagacctggcaggaactctggcagcggcggaacacagttcatattgcctgccaccggctcgacgataatacaggcaatctcttgcgggtattgctcaaatgcggcgcgtacagaagccagatcattataagtacaggttaaggtatatttggcgaaatctgccggaacgcccgggctgtttggctggcctaacgtgagtgcgccagaaccggctttcaccagcaggcagtcagcgtgaccatggtaacacccttcaaatttaataattttgtcgcgaccggtaaaaccacgggccaggcggatggcgctcatggtcgcttcagtgccggagttcaccatgcgcaccatatccatggtcgggaccagttcggtcaccagttgcgccattttcacttccatttcggttggtgcaccaaagcttaaaccacgctcggcggcttcaatcacggcattgcggattgccggatggttatggcccagcaccatcggcccccaggaaccgacataatcgatataggctttgccatcaacatcgtacagataagcgccgtccgctttttcgataaacagtggagtgccgcccacgccagtaaaggcgcgaacaggggagttcacaccgccagggatcagctcgcgcgctgcgctgtaaagattttcagacttactcatggagggttcctgattcgtagaaaaagtgaatggctgctattctatgttattcataacaagttaaatactcgtcaaacatcaggctgcttgtactggtgcaatcctgatttcttagagtataaaagttttgtgcatttgaaacattacgctttgcaaaggattttcatggaacgtgcgagtaaaatgccgtcatcttatttgtatgaccaataagtgatcattggatgaaaactgatactccctctttagaaacaccgcaggccgcgcgcctgcgacgcagacaactgattcgccaacttcttgagcgcgataaaaccccgttagccattttgtttatggcggcagtcgtcggcacgcttgttgggctggcagcggttgcttttgacaaaggtgtcgcctggttgcagaaccaacgtatgggggcgctggtacatactgctgataattatccgcttctgttaaccgtcgcttttctctgtagcgcggtgctggcgatgtttggctactttttggtgcgcaaatacgcgccggaagcaggtggtagcgggatcccggaaattgaaggggcgctggaagatcaacgtcccgttcgctggtggcgtgtattgccggtgaagttctttggcgggctggggacactcggcggaggcatggtgttggggcgcgaagggccaaccgtgcagatcggcggtaacattggccgtatggtgcttgatattttccgcctgaaaggtgacgaagctcgccatacgctgctggcaaccggtgctgctgcggggctggctgcggcctttaacgcgccgctggcgggtattttgtttattatcgaagagatgcgtccgcagtttcgctatacgttaattagcattaaagcggtatttattggtgtcattatgagcaccattatgtaccggatttttaatcatgaagttgcgttgattgacgtcggtaaactttctgatgcgccgcttaatacgctgtggctttatctgatcctcggtattatttttggcattttcggccctatttttaataaatgggtgctggggatgcaggatttgctgcaccgtgtgcacggcggcaatattaccaaatgggtgctaatgggcggtgcgattggcggtctgtgtggattgctggggtttgtggcaccagcaacgagcggcggcggttttaacctgattcctatcgctaccgcggggaatttcagcatgggaatgctggtgtttatcttcgtcgcgcgggtcattaccaccttactctgcttctcttccggcgcgccgggcggtatttttgccccgatgctggcgctgggtactgtgctgggaaccgctttcggaatggttgccgttgagctgtttccgcaatatcaccttgaggcggggacgtttgctattgccggaatgggggcattactggcggcatctattcgcgcgccgttaacggggatcattctggttctggagatgaccgataactaccagctcattttgccaatgattattaccggtcttggcgcaacactattagcgcaatttaccggcgggaaaccgctatacagcgcgattcttgcgcgcacgctggcaaaacaggaagctgagcaactggcgcgaagcaaggccgcaagtgccagcgagaatacttgaacgaaataccagggtattagataatggcgattattattgggttagaatttgcccaattgccgatgtcgtttggagcaaaatatgagtgatgacgtagcactgccgctggagtttaccgacgcagcagccaacaaagttaaaagcctgatcgctgacgaagataacccgaatctgaaattacgcgtgtatatcaccggtggcggttgcagcggcttccagtatggtttcacctttgatgatcaggtgaacgaaggcgatatgaccatcgaaaaacagggcgttggcctggtggttgatccgatgagcctgcaatatctggtcggcggttccgttgattataccgaaggtctggaaggttctcgtttcatcgtgaccaacccgaacgcgaaaagcacctgcggttgcggttcttcctttagtatctaatctgttgttcatgtgccggataaactatccggcacatcttctctcttcaacgcccattctcatccagcgcaaacgtcggtagcttaagatgccaacgaatagccgccagccgaatcaatagcgtcacgaccatgcccatcatactggctgtttccagtggtacggaaaatgtgtaataagccgtagcgtggacaataccgccgataatacaggcagttgcgtagatttctgtacgtaaaatcatggggatttcgcgggccagaacatcacgaatgatcccgccgccaacgccagtaatgacgcccatacaaaccgcgattaacggaccggcttccgcattaaaggctttattcacgccaatgccgacaaacaccgccagaccaacggcgtccagcaccggcaacatccattttggtaagcgtcttggctggcgcaccagcacgatggtcagcatgctggtgaccattgcaacgaccagatcggtgggatctttcacccaaaataccgggccgtgatccagcgccatgtcgcgaattgtcccgccgcctactgcggttaccacgcccagtaccagaacaccaaaagggtccatacgcaattttccggctaacaaaacgccggagatggcaaataccgctgtgccgactatatccagccaatagacgagcattgttcaatccccactgagcacctgaaaaggtcaggcgttaatctacctgactaagcgcattacagagctgttgtgcagcgaggataatacgtgggcttgcacgttcaaaccagtcactcgtgagaggaataacgggaattttgagctgttcaccccagtattgtttgattttaggaatttggtccggtccgcctgtaatgacaatcgcctgtgggctgcgtgctaacacctgttcgcggctaacttgcggccagggaacccggctgtctttaaagatgttttctccgccacaaacttcgagtacctggttctgaatgctctcttttccactggtaaatggcggattaatgccgaattgcagaaaaacacgttttttaggtttatcagcatattgcgctttcaattgcgcgtactgatccagcagggattgcgcggcttgttcggccttgtctggttgcggactccagggggccagttgacgtaacgcattggcaatttgttcaatgcttgtcgcatcgacccacatcacttttattcccaggctagccagctggtcaacctgccgctcggcattacctccacgccaggcaatcaccagatcgggtttcagcgcgacaatgcgttccagattcatcccctgccaggtggaaacctgctcaatcttttgcgcttgtggaggatagtcggaatagctgctgaccccaaccggcgtgatcccggcggcaaaggcaagttcagtgttggcgggagaaagcgtgatgacgcgcggcgcggcgttgagccacagtggcgcaagaaaagacagggcgaccagcgccctgaacagactcttagccatgtgcaagtttctgcaccagactctcaaccatcaggctggactgtttagcggcaacagccaggaactcatcgaagctaagatgagactgttgatcggccacgtcggagatggcgcgtacgacaacaaacgggacgttgaaattgtggcagacatgggcgattgccgtcgcttccatctctacagcaatggcctgtgggaagttgtggcggattttcgccagaccaacagaaccgttgatgaaagcgtcgccgctaacaatcaggccacgtacagcgttaagattcagttcggcaatgcaggcctcagcggcagcgatcagtttatcgtcagctttaaagcctgccggacagcctggtaactgaccgtattcataaccaaatgccgtgacatccgcgtcgtgataacgtgcttcgtcgctgacaacgatatcgcccactttcaacgttggtgccaggccaccggcagaaccggtgttaataatcacatctggcttgcagtgttccaacagcaaagtggcacccagcgccgcagcgactttaccgatgccgcttttcagaagcgcaacctcggttccattcagttggccggtatagatttcgcaaccgccgagactgatagtttgacggttttcgattttgtcacgcagcagcgtaacttcttcttccattgcaccaatgatgccgattttcatagatttactcgcgataagcccgatttgaaggcatagtttaccatgcgcttacggggaagcgtatttctcacgcgggagaggacatggcacagattgatttccgaaaaaaaataaactggcatcgtcgttaccgtagtccgcagggcgttaaaaccgaacatgagatcctgcggatcttcgagagcgatcgcgggcgtatcatcaactctccggcaattcgtcgtctgcaacaaaagacccaggtttttccactggagcgcaatgccgccgtgcgcacgcgtcttacccacagcatggaagtccagcaggtggggcgctacatcgccaaagaaattttaagccgtctgaaagagcttaaattactggaagcatacggcctggatgaactgaccggtccctttgaaagcattgttgagatgagttgcctgatgcacgatatcggcaatccgccgtttggtcattttggcgaagcggcgataaatgactggtttcgccaacgtttgcacccggaagatgccgaaagccagcctctgactgacgatcgctgcagcgtggcggcactacgtttacgggacggggaagaaccgcttaacgagctgcggcgcaagattcgtcaggacttatgtcattttgaggggaatgcacaaggcattcgcctggtgcatacattgatgcggatgaatctcacctgggcacaggttggcggtattttaaaatatacccgtccggcgtggtggcgtggcgaaacgcctgagacacatcactatttaatgaaaaagccgggttattatctttctgaagaagcctatattgcccggttgcgtaaagaacttaatttggcgctttacagtcgttttccattaacgtggattatggaagctgccgacgacatctcctattgtgtggcagaccttgaagatgcggtagagaaaagaatatttaccgttgagcagctttatcatcatttgcacgaagcgtggggccagcatgagaaaggtagcctctttagcctggtggttgaaaatgcctgggaaaaaagtcgcagtaatagtttaagccgcagtacggaagatcagttttttatgtatttacgggtaaacaccctaaataaactggtaccctacgcggcacaacgatttattgataatctgcctgcgattttcgccggaacgtttaatcatgcattattggaagatgccagcgaatgcagcgatcttcttaagctatataaaaatgtcgctgtaaaacatgtgtttagccatccagatgtcgagcggcttgaattgcagggctatcgggtcattagcggattattagagatttatcgtcctttattaagcctgagcttaagtgactttactgaactggtagaaaaagaacgggtgaaacgtttccctattgaaagccgcttattccacaaactcagcacgcgccatcggctggcctatgtcgaggctgtcagtaaattaccgagtgattctcctgagtttccgctatgggaatattattaccgttgccgcctgctgcaggattatatcagcggtatgaccgacctctatgcgtgggatgaataccgacgtctgatggccgtagaacaataaccaggcttttgtaaagacgaacaataaatttttaccttttgcagaaactttagttcggaacttcaggctataaaacgaatctgaagaacacagcaattttgcgttatctgttaatcgagactgaaatacatgaaaaaaaccacattagcactgagtgcactggctctgagtttaggtttggcgttatctccgctctctgcaacggcggctgagacttctagtgcaacgacagcccagcagatgccaagccttgcaccgatgctcgaaaaggtgatgcctagtgtggtcagcattaacgtagaaggtagcacaaccgttaatacgccgcgtatgccgcgtaatttccagcagttcttcggtgatgattctccgttctgccaggaaggttctccgttccagagctctccgttctgccagggtggccagggcggtaatggtggcggccagcaacagaaattcatggcgctgggttccggcgtcatcattgatgccgataaaggctatgtcgtcaccaacaaccacgttgttgataacgcgacggtcattaaagttcaactgagcgatggccgtaagttcgacgcgaagatggttggcaaagatccgcgctctgatatcgcgctgatccaaatccagaacccgaaaaacctgaccgcaattaagatggcggattctgatgcactgcgcgtgggtgattacaccgtagcgattggtaacccgtttggtctgggcgagacggtaacttccgggattgtctctgcgctggggcgtagcggcctgaatgccgaaaactacgaaaacttcatccagaccgatgcagcgatcaaccgtggtaactccggtggtgcgctggttaacctgaacggcgaactgatcggtatcaacaccgcgatcctcgcaccggacggcggcaacatcggtatcggttttgctatcccgagtaacatggtgaaaaacctgaccagccagatggtggaatacggccaggtgaaacgcggtgagctgggtattatggggactgagctgaactccgaactggcgaaagcgatgaaagttgacgcccagcgcggtgctttcgtaagccaggttctgcctaattcctccgctgcaaaagcgggcattaaagcgggtgatgtgatcaccagtctgaacggtaagccgatcagcagctttgccgcactgcgtgctcaggtgggtactatgccggtaggcagcaaactgaccctgggcttactgcgcgacggtaagcaggttaacgtgaacctggaactgcagcagagcagccagaatcaggttgattccagctccatcttcaacggcattgaaggcgctgagatgagcaacaaaggcaaagatcagggcgtggtagtgaacaacgtgaaaacgggcactccggctgcgcagatcggcctgaagaaaggtgatgtgattattggcgcgaaccagcaggcagtgaaaaacatcgctgaactgcgtaaagttctcgacagcaaaccgtctgtgctggcactcaacattcagcgcggcgacagcaccatctacctgttaatgcagtaatctccctcaaccccttcctgaaaacgggaaggggttctccttacaatctgtgaacttcaccacaactccatacatcttcatcatcctttaggcatttgcacaatgccgtacgttacgtacttccttatgctaagccgtgcataacggaggacttatggctggctggcatcttgataccaaaatggcgcaggatatcgtggcacgtaccatgcgcatcatcgataccaatatcaacgtaatggatgcccgtgggcgaattatcggcagcggcgatcgtgagcgtattggtgaattgcacgaaggtgcattgctggtacttagtcagggacgagtcgtcgatatcgatgacgcggtagcacgtcatctgcacggtgtgcggcaggggattaatctaccgttacggctggaaggtgaaattgtcggcgtaattggcctgacaggtgaaccagagaatctgcgtaaatatggcgaactggtctgcatgacggctgaaatgatgctggaacagagccggttgatgcacttgttggcgcaggatagccgtttgcgggaagaactggtgatgaacctgattcaggcagaggagaatactcccgcacttactgaatgggcgcaacggctggggatcgatctcaatcaaccgcgagtggtggctattgttgaggtcgacagcggtcagcttggcgtggacagcgcaatggcggagttacaacaactgcaaaacgcgctgactacgcccgagcgtaataatctggtggcgattgtcagcctaaccgaaatggtggtgttgaaaccggcgttgaactcttttgggcgctgggatgcagaagatcatcgtaagcgagttgaacaactgattacccgcatgaaagagtacggccagctgcgttttcgcgttagtctgggcaactattttaccggtcctggcagtattgcccgatcctatcgtacggcgaaaacgacgatggtggtgggtaaacagcggatgccagaaagtcgctgctatttttatcaggatctgatgttacctgtgttactcgacagtttgcgtggcgactggcaggccaacgaactggcgcgaccgctggcgcggctgaaaacgatggacaataacggcttgctgcgacgaacgctggcggcgtggtttcgccacaatgtgcaaccgctggcaacgagtaaggcgttgtttattcatcgtaataccctggagtatcggcttaatcgtataagcgaactgaccgggcttgatttgggcaattttgatgacaggttgctgctgtatgtggcgttacaactggatgaagagcggtaagttatgcgttaaggttgaggcggcgctggctcattcccctcagcccgaagggtagaggggaatgcccgaattaaccgtcagttcgggattatttacgcgttagtttttccagatcggcttcaatctcgctgatcttattggttacgacactctccaggtgacgtaagtcgtcgaggatcttacgcttaagatcaacttcgctgcggtcacgctggcagatttgatcaagctcatcaatgatataccgtagattcgggctgatttcctggacttctttataaccctgacccacaccatcagcgacgaccgttttacgctgacgcggatatttaaacttaacgctcttggcgaaaaactcgcctttgtctttctggaaatagattttcagaatatcgttgttggcttcctgccggaggctgtaacgatcaatttcttcaggattggtaatacccagacttttcagattgtcgtacatagcgttacctcaaaatgagtcagtaaattgtgcttattttagcatttggcctggcccgcccggctcgactgtgatcgcagaaagcctttttcttccagacttctatcatggcgtaaaaatcaaaaaattacctgctttattctggtgataaaattcacgatttacaccagttccagcatcgttacttccgggcggcagttcagacgcaaaccatacaaactgcccacgccacgggttgtgtagatgtgtctttcgccaaaggcatttaatccggcgacgtaacgtttatcttcgacaggggcaaaaggttcaccaaccaacggtacgcgcagttgcccgccgtgagtatggccgcacagcatcagatcccagggttcatcacgcatgacttctttgctgtcgggattatgcgccagcaccagtcttggcagattggcttcgctggcgggaggcggtttgcattgtccggcccataagtcaccagtgcctaccagttcgaattgcctgttcggcgtggcgatcaccgtagcctggttaaacaacaccgtgatgcccgcacttttcaacgtctcgccaattaagtgatttttttctgtaccaacagggcgatcgtggttgccgaagcaggcaaacgtcggcgcacattcggcaaggggggagagtacgtcactaaacgcgctaaaattcaggctcatatcaaataatacgtaatcgccgcccagtaatatcaaatcgggcttttgttctatgccaagagcaatcgcgtcagaaatcaggcttaaaggaacaaaacgagagtaatggagatcggccagaaaaagaattttgaatggtgctgcgttgtctttaaaaaaggcgaggcggtgacggattaattcaaaccagcctggctcacagtaatgcatataaccgaaaccactgctcgtggctatcgtcgcggcagtagcctgcaaaaatcggcggcgactaatcatcgctcatccctgcaaaaaaatcgggcagcgtcgtgctgcccgtgtgcatacttttagtcgatggtacgcagcagttcgttaatgccgactttgccgcgagttttcgcgtcaactttcttaacgataaccgcacagtagaggctgtatttgccatctttactcggcagattaccactaacaaccacagaccccgccggaacgcgaccgtagtggatttcgccggtttcacggtcgtaaatacgggtgctctgaccaatgtatacgcccatggaaatgacggaaccttcttcgacaatcaccccttcaaccacttcagagcgcgcgccgatgaagcaattatcttcaatgatggttgggttagcctgcagcggttccagcacgccgccgatgcccacgccaccggaaaggtggacgtttttaccaatctgcgcacaagaaccgacggtcgcccaggtatcaaccatggtgccttcatcaacatatgcgccgatgttgacgtaagacggcatcagcacggtgttacgggcaataaacgcaccctgacgtaccgccgctggtggcacaacgcggaagccttctttctggaaacgtgcttcgtcgtagtcggcgaatttcatcggcactttgtcgaagtagcggctttctgccccttcgatcacctgattatcattaatacggaaagagagcagcaccgcttttttcaaccactgatgcgtcacccactgaccgtcaattttttccgctacacgcagtgcgccggaatccagcagggcgatcacctgatttaccgcttcgcgggtaacggtgtctgcattggctggcgtgatctcggcacggcgttcaaaagcggtttcaataatgttctgtaactgctgcattgttaaactcttttcatatcagtaaacacatcaccctttatcgtttggattgagggcctctgtcaaccgctgatgcacttcctgctgcaactcgttattaagcgcacgccggtcagcggtggcaattatgaataaatcttctactcgctcgccaatggttgtaattcgggcaccatgaaggctaattcccagatcggcaaaaattttcccgactcgcgccagcagtccaggttggtcgagggcgatcagttcgaggaagcttttgcggtcggtatgggtcggcaaaaacgttacttcggtttcaacagtaaaatggcgtaatttggcgggttggcgacggggctgcggtggctgccagctactttgcgtcagtacttgctccagaccaaaccgaataacctcatgacgatctgcggacagcgggttgccatcgggttccagcacgataaaggtatccatcgccataccgtcgcgagtggtgaaaatttgtgcgtcgtgaacacttaaattgcggcggtctaattcggcacagacggcggcaaacagataagggcggtccgggctccagataaaaatctcggtgcctccacgcgtagcctgcgggctaagcaataccagcggtttgcttaaatcatgctgtaataaatggcgggcatgccaggccagttgatttgggctatggcggacaaaatagttagcacgacagcgactccaaatttggtgcagcgcctcttcgtcgatgttatccatgcgcagtagtgccagtgcctggagttggtgatggcgaacccgttcgcgcatatccggcgtgttttgcattccgcgtcgtagctgcttttcggtggcaaagtagagctcacgcaacagactttgcttccagctattccacagcgtttcgttggtggcgcaaatgtcagccacagtcaggcataccagatagcgcagacgattttccgtttgcacttcttcggcaaactgcttgatgacttccgggtcctgaatatcgcggcgttgggcggtcacgctcatcaacaggtgctggcgaaccagccaggcgaccagctgtgtttcgcgactgttcagcccgtggagttcggcaaaatgcactacatcctgagcaccgagaatggagtggtcgccgccgcgtcctttggcgatatcgtgaaacagcgcggcgatgaaaatcagctcagtactcggcaggcgcggccagacgtccacacacaacggatggcgctggcgcgtttcttcactggcaaaactctccagtttcagcatcacgcggatagtatgttcatccaccgtgtaggcgtggaacagatcaaactgcatctgcccgacgatatggctccattgcggcatatacgcgccgagcacgctatggcgatgcattggcaatagcccgcgccgcaccgctccggggtgacgcagaatgctcaaaaacagttttcgtgcttccggaatattacacagcggttgttgcagatggcgacgggcatggcgtaactggcgcagcgtggtggagtaaatgccggtgatcgcactgttgtgcaccatggtgtagaacatacgcaagatggcttccggctggcgcataaatagtgtttcatcacgcaggtcgattagcgtaccgcgtagctgaaactcatcgtcgattggacgtggtttttcgtcggcgggaagggcgaggatggcttcatcgaacagttgcagcagcatctggttgagttcactgacgcggcgtgtaacgcggaagtaatccttcatcatccgctcgaccggttcgttaccttcaccactgtaattcagacgctgggcgacgctaagctggcgatcgaataacaggcgattatcgtaacggctgacgaccagatgcagggcaaagcgaatacgccacaatatatgcagacattcgtttaattccgcccgctccgcactggttaagaagccaaacccgaccatttcatccaggcttgttgcgccaaaatgacggcgggccacccattgcagagtgtggatatcgcgcaagccgccagggctgcttttgatgtctggttcaaggttgtagctggtgccatggtaacgctgatggcgctggttctgttcttcaactttcgccgcgtagaacttgtcggaaggccagaatccttcgctgaaaatatgtttttgcagttcgaggaacagcgcaacatcgccaattaataagcgggattcgattaaattggtggcgacggttaaatcgcttaacccttccagcatgcactcttcaagcgtgcgcacgctatgaccgacttccagctttacatcccagagcagcgttaacagctcgcccactttttgcgcctgatcgtccgggagctttttacggcttaaaatcagtaaatcgacgtcactaagtggatgcagctcgccacgaccgtagccaccgacggcgaccaatgccaggtcggcaatctggctgaatcccgcttcaatccataatcgttgcaggagctggtcgataaactcggtgcgcgcctcaatcaactgttctgcagagatcccattgtcaaaggcatcacccagccaacgctggaaagtatcgatatgggcttttatcccaccgacggttaattcatcacggggccagacgcatggattttgcggttgaccgggcagggtggggagagcggtgtttgcgtactgttctggaagggtattcattgtgcgccacccataagattaaattatcgcattaaaaaagccggcattcgccggcttcatcttattcgtcgtggctgattatcgccgggatggtgtcatccttgcgtagcgtcagaatttcgcagccgttatcagtcaccacaatagtatgctcatattgtgcagacaagctgcgatctttggtttttaccgtccagccatctttcatggtgcggatctcttttttacccgcgttgaccattggctcgatggtgaacgtcatcccaggtttcagtacgacgttggtttcacgggagtcatagtgcagcacctgcggttcttcatggaagccgcgaccaataccgtgtccgcaatattcacgaacgacggagaagccttctgcttcgacaaatttctgaatcgccgcaccgatttcgcgcagattaatgcctggttttaccatgcgtagcgccaggtacaggctttcttgcgtgatgcggcacagacgttcgcccatgatggtcggcttaccgacgataaacattttgctggtatcgccgtggaaaccatctttgattacggtgacatcaatgttaacgatatcgccatctttcagcagcttagcatcgtccgggataccgtggcacaccacttcattaatagagatgcaaacggatttcggatagccgtgatagccgaggcaggcagaaaccgcgtgttgttcattaacaatgtaatcattacagatgcgatccagctcgccggtgctgacgcccggtttaacatacggttcgatcatctccagcacttcggcagccagtcggccagcgacgcgcattttttcgatatcttctggggtcttgatagagatagccattaattctgtccatcagcgtcggtgataccgacaatatatatgtaagtgccgtcaatggtatcacacccgggcaaattgagaatcattctgaatttcgccaaacgtgccactgaaggttttctataatagaaaattcgacgtctgatgctgtacacagcgccaacaattattggtgtccacgacgtatttgtggtataaagcgcgccggacttccgatccatttcgtatacacagactggacggaagcgacaatctcactttgtgtaacaacacacacgtatcggcacatattccggggtgccctttggggtcggtaatatgggatacgtggaggcataaccccaacttttatatagaggttttaatcatggcaactgtttccatgcgcgacatgctcaaggctggtgttcacttcggtcaccagacccgttactggaacccgaaaatgaagccgttcatcttcggtgcgcgtaacaaagttcacatcatcaaccttgagaaaactgtaccgatgttcaacgaagctctggctgaactgaacaagattgcttctcgcaaaggtaaaatccttttcgttggtactaaacgcgctgcaagcgaagcggtgaaagacgctgctctgagctgcgaccagttcttcgtgaaccatcgctggctgggcggtatgctgactaactggaaaaccgttcgtcagtccatcaaacgtctgaaagacctggaaactcagtctcaggacggtactttcgacaagctgaccaagaaagaagcgctgatgcgcactcgtgagctggagaaactggaaaacagcctgggcggtatcaaagacatgggcggtctgccggacgctctgtttgtaatcgatgctgaccacgaacacattgctatcaaagaagcaaacaacctgggtattccggtatttgctatcgttgataccaactctgatccggacggtgttgacttcgttatcccgggtaacgacgacgcaatccgtgctgtgaccctgtacctgggcgctgttgctgcaaccgtacgtgaaggccgttctcaggatctggcttcccaggcggaagaaagcttcgtagaagctgagtaataaggcttgataactcccccaaaatagttcgagttgcagaaaggcggcaagctcgagaattcccgggagcttacatcagtaagtgaccgggatgagcgagcgaagataacgcatctgcggcgcgaaatatgaagggggagagcccttatagaccaggtagtacacgtttggttagggggcctgcatatggccccctttttcacttttatatctgtgcggtttaatgccgggcagatcacatctccgaggattttagaatggctgaaattaccgcatccctggtaaaagagctgcgtgagcgtactggcgcaggcatgatggattgcaaaaaagcactgactgaagctaacggcgacatcgagctggcaatcgaaaacatgcgtaagtccggtgctattaaagcagcgaaaaaagcaggcaacgttgctgctgacggcgtgatcaaaaccaaaatcgacggcaactacggcatcattctggaagttaactgccagactgacttcgttgcaaaagacgctggtttccaggcgttcgcagacaaagttctggacgcagctgttgctggcaaaatcactgacgttgaagttctgaaagcacagttcgaagaagaacgtgttgcgctggtagcgaaaattggtgaaaacatcaacattcgccgcgttgctgcgctggaaggcgacgttctgggttcttatcagcacggtgcgcgtatcggcgttctggttgctgctaaaggcgctgacgaagagctggttaaacacatcgctatgcacgttgctgcaagcaagccagaattcatcaaaccggaagacgtatccgctgaagtggtagaaaaagaataccaggtacagctggatatcgcgatgcagtctggtaagccgaaagaaatcgcagagaaaatggttgaaggccgcatgaagaaattcaccggcgaagtttctctgaccggtcagccgttcgttatggaaccaagcaaaactgttggtcagctgctgaaagagcataacgctgaagtgactggcttcatccgcttcgaagtgggtgaaggcatcgagaaagttgagactgactttgcagcagaagttgctgcgatgtccaagcagtcttaattatcaaaaaggagccgcctgagggcggcttctttttgtgcccatcttgtaaattcagctaacccttgtggggctgcgctgaaaagcgacgtacaatgtcgctagtattaattcatttcaatcgttgacagtctcaggaaagaaacatggctaccaatgcaaaacccgtctataaacgcattctgcttaagttgagtggcgaagctctgcagggcactgaaggcttcggtattgatgcaagcatactggatcgtatggctcaggaaatcaaagaactggttgaactgggtattcaggttggtgtggtgattggtgggggtaacctgttccgtggcgctggtctggcgaaagcgggtatgaaccgcgttgtgggcgaccacatggggatgctggcgaccgtaatgaacggcctggcaatgcgtgatgcactgcaccgcgcctatgtgaacgctcgtctgatgtccgctattccattgaatggcgtgtgcgacagctacagctgggcagaagctatcagcctgttgcgcaacaaccgtgtggtgatcctctccgccggtacaggtaacccgttctttaccaccgacagtgcagcttgcctgcgtggtatcgaaattgaagccgatgtggtgctgaaagcaaccaaagttgacggcgtgtttaccgctgatccggcgaaagatccaaccgcaaccatgtacgagcaactgacttacagcgaagtgctggaaaaagagctgaaagtcatggacctggcggccttcacgctggctcgtgaccataaattaccgattcgtgttttcaatatgaacaaaccgggtgcgctgcgccgtgtggtaatgggtgaaaaagaagggactttaatcacggaataattcccgtgatggataaataagggtaagattccgcgtaagtatcgcgggggcgtaagtctggttataaggcgttattgttgcaggcagtttggtcacggccagcgcgcagcaaccggagcgtacaaaagtacgtgaggatggcgagcactgcccggggccaaaatggcaaataaaatagcctaataatccagacgattacccgtaatatgtttaatcagggctatacttagcacacttccactgtgtgtgactgtctggtctgactgagacaagttttcaaggattcgtaacgtgattagcgatatcagaaaagatgctgaagtacgcatggacaaatgcgtagaagcgttcaaaacccaaatcagcaaaatacgcacgggtcgtgcttctcccagcctgctggatggcattgtcgtggaatattacggcacgccgacgccgctgcgtcagctggcaagcgtaacggtagaagattcccgtacactgaaaatcaacgtgtttgatcgtagtatgtctccggccgttgaaaaagcgattatggcgtccgatcttggcctgaacccgaactctgcgggtagcgacatccgtgttccgctgccgccgctgacggaagaacgtcgtaaagatctgaccaaaatcgttcgtggtgaagcagaacaagcgcgtgttgcagtacgtaacgtgcgtcgtgacgcgaacgacaaagtgaaagcactgttgaaagataaagagatcagcgaagacgacgatcgccgttctcaggacgatgtacagaaactgactgatgctgcaatcaagaaaattgaagcggcgctggcagacaaagaagcagaactgatgcagttctgatttcttgaacgacaaaaacgccgctcagtagatccttgcggatcggctggcggcgttttgctttttattctgtctcaactctggatgtttcatgaagcaactcaccattctgggcagcaccggcagcattggttgcagcacgctggacgtggtgcgccataatcccgaacacttccgcgtagttgcgctggtggcaggcaaaaatgtcactcgcatggtagaacagtgcctggaattctctccccgctatgccgtaatggacgatgaagcgagtgcgaaacttcttaaaacgatgctacagcaacagggtagccgcaccgaagtcttaagtgggcaacaagccgcttgcgatatggcagcgcttgaggatgttgatcaggtgatggcagccattgttggcgctgctgggctgttacctacgcttgctgcgatccgcgcgggtaaaaccattttgctggccaataaagaaagtctggttacctgcggacgtctgtttatggacgccgtaaagcagagcaaagcgcaattgttaccggtcgatagcgaacataacgccatttttcagagtttaccgcaacctatccagcataatctgggatacgctgaccttgagcaaaatggcgtggtgtccattttacttaccgggtctggtggccctttccgtgagacgccattgcgcgatttggcaacaatgacgccggatcaagcctgccgtcatccgaactggagcatggggcgtaaaatttctgtcgatagcgctaccatgatgaacaaaggtctggaatacattgaagcgcgttggctgtttaacgccagcgccagccagatggaagtgctgattcacccgcagagtgtgattcacagtatggtgcgctatcaggacggcagtgttctggcgcagctgggggaaccggatatgcgtacgccaattgcccacaccatggcatggccgaatcgcgtgaactctggcgtgaagccgctcgatttttgcaaactaagtgcgttgacatttgccgcaccggattatgatcgttatccatgcctgaaactggcgatggaggcgttcgaacaaggccaggcagcgacgacagcattgaatgccgcaaacgaaatcaccgttgctgcttttcttgcgcaacaaatccgctttacggatatcgctgcgttgaatttatccgtactggaaaaaatggatatgcgcgaaccacaatgtgtggacgatgtgttatctgttgatgcgaacgcgcgtgaagtcgccagaaaagaggtgatgcgtctcgcaagctgaggataatccggctacagagagtcgcgctatttgttagcgtagggcttcagtgatatagtctgcgccatctgatcgtaagtagttggctttataaggtcagatatgccgtggttttacacggcttttttttgtataggcttcagtattcctgagtaccgtaaaccctgtcagggaataaaaaacgcgtgatgttgtctgctactcaaccacttagcgaaaaattgccagcgcatggctgccgtcatgttgcgatcattatggacggcaatggccgctgggcaaaaaagcaagggaagattcgtgcctttgggcataaagccggggcaaaatccgtccgccgggctgtctcttttgcggccaacaacggtattgaggcgttaacgctgtatgcctttagtagtgaaaactggaaccgaccagcgcaggaagtcagtgcgttaatggaactgtttgtgtgggcgctcgatagcgaagtaaaaagtctgcaccgacataacgtgcgtctgcgtattattggcgataccagtcgctttaacagccgtttgcaagaacgtattcgtaaatctgaagcgctaacagccgggaataccggtctgacgctgaatattgcggcgaactacggtggacgttgggatatagtccagggagtcaggcaactggctgaaaaggtgcagcaaggaaacctgcaaccagatcagatagatgaagagatgctaaaccagcatgtctgtatgcatgaactggcccctgtagatttagtaattaggactgggggggagcatcgcattagtaactttttgctttggcaaattgcctatgccgaactttactttacagatgttctctggcccgatttcgatgaacaagactttgaaggggcgttaaatgcctttgctaatcgagagcgtcgtttcggcggcaccgagcccggtgatgaaacagcctgatgggggtcgcttttgctgaagtatcgcctgatatctgcttttgtgttaatacccgtcgtcatcgcggcgttgtttctgttgccgccggtggggttcgccattgtaacgctggtggtctgcatgctggcagcgtgggaatggggacagcttagcggttttaccactcgtagccagcgagtatggttggcggtgttatgcgggttattgttggcgctgatgctttttctgttgccggaatatcaccgaaatattcatcaaccgctggttgaaatcagtctttgggctagcctgggttggtggattgtcgcgctattgctggtgctgttttacccaggttccgcagcaatctggcgtaactctaaaacattgcgccttatttttggcgtgctaaccattgttcccttcttctggggcatgctggcgttacgggcctggcactatgacgagaatcattacagtggcgcaatatggttgctctatgtcatgatcctggtatggggcgctgactccggcgcatatatgtttggcaaattgtttggtaaacataagctggcaccgaaggtttctccgggtaaaacctggcaaggctttatcggtggactcgctactgcagcggtaatcagttggggttatggcatgtgggcgaatctcgacgtcgctcccgtcaccttactcatttgctctattgtcgcagcgttagccagtgtgctcggcgatctgaccgagagtatgtttaagcgtgaagcaggaattaaggacagcggtcatttaattccaggacacggtggtattttagatcgtattgatagcctgacggctgcggtaccggtctttgcttgcttgttgttactggtattcaggacgctttaacggaaggtaatatgctgagttttctctgggatttggctagcttcatcgttgcactgggtgtacttatcaccgtgcatgaatttggtcatttctgggttgcccggcgttgtggtgttcgcgttgagcgtttcagtatagggtttggtaaggcgctctggcggcgaactgataagctcggcaccgaatatgttatcgccctgatcccgttgggcggttatgtcaaaatgctggatgagcgcgcagaaccggtcgttccggaactccgccaccatgccttcaataataaatctgtcggccaacgagcggcgattattgccgcaggtccggttgcaaacttcatttttgctatctttgcctactggctggtttttattattggtgtgcctggcgtacgtccggtggttggcgaaatagcagccaatagcatagctgcggaagcacaaattgcaccaggtacggaactaaaagccgtagatggtatcgaaacgcctgattgggatgccgtgcgtttgcagttggtcgataaaattggcgatgaaagcaccaccattacagtagcgccatttggcagcgaccaacggcgggatgtaaagctcgatttacgtcactgggcgtttgagcctgataaagaagatccggtatctagcctggggattcgtcctcgtgggccgcaaattgaacctgtactggaaaatgtgcagccaaacagcgcggcaagcaaggcaggtttgcaagcaggcgacaggatcgttaaagtcgatggtcagcccttaacgcagtgggtgacctttgtgatgcttgtccgggataacccgggtaaatccttagcgttagaaatcgaaaggcaggggagtcccttgtctttgacattaatcccggagagtaaaccgggtaatggtaaagcgattggttttgtcggtattgagccgaaagtcattcctttgccagatgagtataaagttgtacgccagtatgggccgttcaacgccatcgtcgaagccacggacaaaacgtggcagctgatgaagctgacggtcagtatgctgggaaaattgatcaccggtgatgtgaaactgaacaacctcagtgggccgatctctatcgccaagggggctgggatgacagcggaactcggggttgtttattacctgccgtttcttgcgcttattagcgtgaacttagggataattaacctgtttccgttgcccgtacttgacggggggcatctgctgttccttgcgatcgaaaagatcaagggcggaccggtatccgagcgggttcaagacttttgttatcgcattggcagcattctgctggtgctgttaatggggcttgcacttttcaatgatttctctcggttatgagagttagttaggaagaacgcataataacgatggcgatgaaaaagttgctcatagcgagcctgctgtttagcagcgccaccgtatacggtgctgaagggttcgtagtgaaagatattcatttcgaaggccttcagcgtgtcgccgttggtgcggccctcctcagtatgccggtgcgcacaggcgacacggttaatgatgaagatatcagtaataccattcgcgctctgtttgctaccggcaactttgaggatgttcgcgtccttcgtgatggtgatacccttctggttcaggtaaaagaacgtccgaccattgccagcattactttctccggtaacaaaagcgtgaaagatgacatgctgaagcaaaacctcgaggcttctggtgtgcgtgtgggcgaatccctcgatcgcaccaccattgccgatatcgagaaaggtctggaagacttctactacagcgtcggtaaatatagcgccagcgtaaaagctgtcgtgaccccgctgccgcgcaaccgtgttgacctaaaactggtgttccaggaaggtgtgagtgctgaaatccagcaaattaacattgttggtaaccatgctttcaccaccgacgaactgatctctcatttccaactgcgtgacgaagtgccgtggtggaacgtggtaggcgatcgtaaataccagaaacagaaactggcgggcgaccttgaaaccctgcgcagctactatctggatcgcggttatgcccgtttcaacatcgactctacccaggtcagtctgacgccagataaaaaaggtatttacgtcacggtgaacatcaccgaaggcgatcagtacaagctttctggcgttgaagtgagcggcaaccttgccgggcactccgctgaaattgagcagctgactaagatcgagccgggtgagctgtataacggcaccaaagtgaccaagatggaagatgacatcaaaaagcttctcggtcgctatggttatgcctatccgcgcgtacagagcatgcccgaaattaacgatgccgacaaaaccgttaaattacgtgtgaacgttgatgcgggtaaccgtttctacgtgcgtaagatccgttttgaaggtaacgataccagcaaagatgccgtcctgcgtcgcgaaatgcgtcagatggaaggtgcatggctggggagcgatctggtcgatcagggtaaggagcgtctgaatcgtctgggcttctttgaaactgtcgataccgatacccaacgtgttccgggtagcccggaccaggttgatgtcgtctacaaggtaaaagagcgcaacaccggtagcttcaactttggtattggttacggtactgaaagtggcgtgagcttccaggctggtgtgcagcaggataactggttaggtacaggttatgctgttggtatcaacgggaccaaaaacgattaccagacctatgctgaactgagcgtaaccaacccgtacttcaccgtagatggcgtaagcctcggtggtcgtctcttctataatgacttccaggcagatgacgccgacctgtccgactataccaacaagagttatggtacagacgtgacgttgggcttcccgattaacgaatataacagcctgcgtgcaggtctgggttatgtacataactccctgtccaacatgcagcctcaggttgcgatgtggcgttatctgtactctatgggtgaacatccgagcacctctgatcaggataacagcttcaaaacggacgacttcacgttcaactatggttggacctataacaagcttgaccgtggttacttcccgacagatggtagtcgtgtcaacctgaccggtaaagtgaccattcctggaagcgataacgaatactacaaagtgacgttagacacggcgacttatgtgccgatcgatgacgatcacaaatgggttgttctggggcgtacccgctggggttatggtgatggtttaggcggcaaagagatgccgttctacgagaacttctatgccggtggttccagcaccgtgcgtggcttccagtccaataccattggtccgaaagcagtttacttcccgcatcaggccagtaattatgatccggactatgattacgaatgtgcgactcaggacggcgcgaaagacctgtgtaaaagcgatgatgctgtaggcggtaacgccatggcggttgccagcctcgagttcatcaccccgacgccgtttattagcgataagtatgctaacagcgttcgtacttccttcttctgggatatgggtaccgtttgggatacaaactgggattccagccaatattctggatatccggactatagtgatccaagcaatatccgtatgtctgcgggtatcgcattacaatggatgtccccattggggccgttggtgttctcctacgcccagccgttcaaaaagtacgatggagacaaggcagaacagttccagtttaacatcggtaaaacctggtaagtgttctccacaaaggaatgtagtggtagtgtagcgatgactttaggcgatcaatataagatcgccgggccacgcaaagaactgcaccctccggtgcaaatgggatggtaaggagtttattgtgaaaaagtggttattagctgcaggtctcggtttagcactggcaacttctgctcaggcggctgacaaaattgcaatcgtcaacatgggcagcctgttccagcaggtagcgcagaaaaccggtgtttctaacacgctggaaaatgagttcaaaggccgtgccagcgaactgcagcgtatggaaaccgatctgcaggctaaaatgaaaaagctgcagtccatgaaagcgggcagcgatcgcactaagctggaaaaagacgtgatggctcagcgccagacttttgctcagaaagcgcaggcttttgagcaggatcgcgcacgtcgttccaacgaagaacgcggcaaactggttactcgtatccagactgctgtgaaatccgttgccaacagccaggatatcgatctggttgttgatgcaaacgccgttgcttacaacagcagcgatgtaaaagacatcactgccgacgtactgaaacaggttaaataagtaatgcctagtattcgactggctgatttagcgcagcagttggatgcagaactacacggtgatggcgatatcgtcatcaccggcgttgcgtccatgcaatctgcacaaacaggtcacattacgttcatggttaacccaaaataccgtgagcatttaggcttgtgccaggcgtccgcggttgtcatgacccaggacgatcttcctttcgcgaaaagtgccgcactggtagtgaagaatccctacctgacttacgcgcgcatggcgcaaattttagataccacgccgcagcccgcgcagaacattgcacccagtgcggtgatcgacgcgacggcgaagctgggtaacaacgtaagcattggcgctaacgcggtgattgagtccggcgttgaactgggcgataacgtgattatcggtgccggttgcttcgtaggtaaaaacagcaaaatcggtgcaggtagccgtctctgggcgaacgtaaccatttaccatgagatccagatcggtcagaattgcctgatccagtccggaacagtggtaggcgcagacggctttggttatgccaacgatcgtggtaactgggtgaagatcccacagattggtcgcgtaattattggcgatcgcgtggagatcggtgcctgcacaaccatcgatcgcggcgcgctggatgacactattattggcaatggcgtgatcattgataaccagtgccagattgcacataacgtcgtgattggcgacaatacggcggttgccggtggcgtcattatggcgggcagcctgaaaattggtcgttactgcatgatcggcggagccagcgtaatcaacgggcatatggaaatatgcgacaaagtgacggttacgggcatgggtatggtgatgcgtcccatcactgaaccaggcgtctattccagtggcattccgctgcaacccaacaaagtctggcgcaaaaccgctgcactggtgatgaacattgatgacatgagcaagcgtctgaaaagccttgagcgcaaggttaatcaacaagactaacgttccatcttttgttcgccaaactttacggcctgtctcattcttacgattgcggcaggccgtgttattattgtcgtttcttatattttgacaggaagagtatcttgactactaacactcatactctgcagattgaagagattttagaacttctgccgcaccgtttcccgttcttactggtggatcgcgtgctggattttgaagaaggtcgttttctgcgcgcagtaaaaaatgtctctgtcaatgagccattcttccagggccatttccctggaaaaccgattttcccgggtgtgctgattctggaagcaatggcacaggcaacaggtattctggcgtttaaaagcgtaggaaaactggaaccgggtgagctgtactacttcgctggtattgacgaagcgcgcttcaagcgcccggtcgtgcctggcgatcaaatgatcatggaagtcactttcgaaaaaacgcgccgcggcctgacccgttttaaaggggttgctctggtcgatggtaaagtagtttgcgaagcaacgatgatgtgtgctcgtagccgggaggcctgatacgtgattgataaatccgcctttgtgcatccaaccgccattgtggaagagggcgcgagtattggcgcgaacgcacacattggtcctttttgtatcgttggaccccatgtcgaaattggtgagggtaccgtactgaaatctcacgttgtcgtgaatggtcatactaaaattggccgcgataatgagatttatcagttcgcctccatcggcgaagttaaccaggatctgaaatatgctggcgaaccgacccgtgtggaaatcggcgatcgtaaccgcattcgcgaaagcgtcaccattcatcgtggcacagtccagggcggtggattgacgaaggtgggcagcgacaacttactgatgatcaacgcgcacattgcgcacgattgtacggtaggtaaccgctgtattctcgccaacaacgcaacgctggcgggtcacgtaagcgttgacgacttcgcgatcatcggcggcatgaccgcagtccatcagttctgcatcattggtgcgcacgtgatggttggcggctgctccggtgtggcgcaggacgtccctccttatgtcattgcgcagggtaaccacgcaacgccgttcggtgtcaatatcgaagggctgaagcgccgcggattcagccgtgaggcgattaccgctatccgcaatgcgtataagctgatttatcgtagcggtaaaacgctcgatgaagtgaaaccggaaattgctgaactggcggaaacatatccggaagtgaaagcctttaccgatttctttgcacgcagtacgcgcggtctgattcgttaatgactgaacagcgtccattaacgattgccctggtcgccggagaaacctccggcgatatcctgggggccggtttaatccgcgctctgaaagaacatgtgcccaacgcccgctttgttggtgttgccgggccacgaatgcaggctgaaggctgcgaagcctggtacgaaatggaagaactggcggtgatgggcattgttgaagtgctcggtcgtctgcgtcgcttactgcatattcgtgccgatctgacaaagcgttttggcgaactgaagccagatgtttttgttggtattgatgcgcctgacttcaatattactcttgaaggtaacctcaaaaagcagggtatcaaaaccattcattacgtcagtccgagtgtctgggcgtggcgacagaaacgtgttttcaaaataggcagagccaccgatctggtgctcgcatttctgcctttcgaaaaagcgttttatgacaaatacaacgtaccgtgccgctttatcggtcataccatggctgatgccatgccattagatccagataaaaatgccgcccgtgatgtgctggggatccctcacgatgcccactgcctggcgttgctaccggggagccgtggtgcagaagttgaaatgcttagtgccgatttcctgaaaacggcccagcttttgcgccagacatatccggatctcgaaatcgtggtgccactggtgaatgccaaacgccgcgagcagtttgaacgcatcaaagctgaagtcgcgccagaccttagtgttcatttgctggatgggatgggccgtgaggcgatggtcgccagcgatgcggcgctactggcgagcggtacggcagccctggagtgtatgctggcgaaatgcccgatggtggtgggatatcgcatgaagccttttaccttctggttggcgaagcggctggtgaaaactgattatgtcagcctgccaaatctgctggcgggcagagagttagtcaaagaattattgcaggaagagtgtgagccgcaaaaactggctgcggcgctgttaccgctgttggcgaacgggaaaaccagccacgcgatgcacgataccttccgtgaactgcatcagcagatccgctgcaatgccgatgagcaggcggcacaagccgttctggagttagcacaatgatcgaatttgtttatccgcacacgcagctggttgcgggtgtggatgaagtcggacgcgggccgttagttggcgcggtcgtcaccgctgcggtgatccttgacccggcgcgcccgattgccgggctgaatgattccaaaaagctgagcgaaaaacgccgtctggcgctctatgaagagatcaaagagaaagcgttgagctggagtctgggccgcgcggaaccccacgaaatcgacgagctgaacattcttcatgcgaccatgctggcgatgcagcgtgccgtcgctgggctgcatattgcgccggaatatgtgttgattgatggtaaccgctgcccgaaattaccgatgcctgcgatggctgtggtgaaaggcgatagccgcgtaccggaaatcagtgccgcgtctatcctggcgaaagtgacgcgtgacgccgaaatggcggcgctggatattgttttcccgcaatatggttttgcccaacacaaagggtacccaaccgcttttcatctggaaaaactggctgaacacggcgcgaccgaacaccatcggcgcagctttgggcctgtcaaacgcgcactgggacttgcgtcctgattcttgtgtcgagattaagtaaaccggaatctgaagatgtctgaaccacgtttcgtacacctgcgggtgcacagcgactacagcatgatcgatggcctggccaaaaccgcaccgttggtaaaaaaggcggcggcgttgggtatgccagcactggcgatcaccgatttcaccaacctttgtggtctggtgaagttctacggagcgggacatggcgcagggattaagcctatcgtcggggcagattttaacgtccagtgcgacctgctgggtgatgagttaacccacctgacggtactggcggcgaacaataccggctatcagaatctgacgttgctgatcagtaaagcgtatcagcgcgggtacggtgccgccgggccgatcatcgatcgcgactggcttatcgaattaaacgaagggttgatccttctttccggcggacgcatgggcgacgtcggacgcagtcttttgcgtggtaacagcgcgctggtagatgagtgtgtcgcgttttatgaagaacacttcccggatcgctattttctcgagctgatccgcaccggcaggccggatgaagaaagctatctgcacgcggcggtggaactggcggaagcgcgcggtttgcccgtcgtggcgaccaacgacgtgcgctttatcgacagcagcgactttgacgcacacgaaatccgcgtcgcgatccacgacggctttaccctcgacgatcctaaacgcccgcgtaactatagcccgcagcaatatatgcgtagcgaagaggagatgtgtgagctgtttgccgacatccccgaagcccttgccaacaccgttgagatcgccaaacgctgtaacgtaaccgtgcgtcttggtgaatacttcctgccgcagttcccgaccggggacatgagcaccgaagattatctggtcaagcgtgcaaaagagggcctggaagagcgtctggcctttttattccctgatgaggaagaacgtcttaagcgccgcccggaatatgacgaacgtctggagactgaacttcaggttatcaaccagatgggcttcccgggctacttcctcatcgttatggaatttatccagtggagcaaagataacggcgtaccggtagggccaggccgtggctccggtgcgggtagtctggtggcctacgcgctgaaaatcaccgacctcgatccgctggaatttgacctgctgttcgaacgtttccttaacccggaacgtgtctccatgcctgacttcgacgttgacttctgtatggagaaacgcgatcaggttatcgagcacgtagcggacatgtacggtcgtgatgcggtaagccagatcatcaccttcggtacaatggcggcgaaagcggtgatccgcgacgtaggccgcgtgctggggcatccgtacggctttgtcgatcgtatcagcaaactgatcccgcccgatccggggatgacgctggcgaaagcgtttgaagccgagccgcagctgccggaaatctacgaagcggatgaagaagttaaggcgctgatcgacatggcgcgcaaactggaaggggtcacccgtaacgccggtaagcacgccggtggggtggttatcgcgccgaccaaaattaccgattttgcgccgctttactgcgatgaagagggcaaacatccggtcacccagtttgataaaagcgacgttgaatacgccggactggtgaagttcgacttccttggtttgcgtacgctcaccatcatcaactgggcgctggagatgatcaacaagcggcgggcgaagaatggcgagccgccgctggatatcgctgcgatcccgctggatgataagaaaagcttcgacatgctgcaacgcagcgaaaccacggcggtattccagcttgaaagccgcggcatgaaggacctgatcaagcgtctacaacctgactgcttcgaagatatgatcgccctagtggcactgttccgccccggtccgttgcaaagtgggatggtggataactttatcgaccgtaaacatggtcgtgaagagatctcctatccggacgtacagtggcagcatgaaagcctgaaaccggtactggagccaacctacggcattatcctgtatcaggaacaggtcatgcagattgcgcaggtgctttctggttataccctcggtggcgcggatatgctgcgtcgtgcgatgggtaagaaaaagccggaagagatggctaagcaacgttctgtatttgctgaaggtgcagaaaagaacggaatcaacgctgaactggcgatgaaaatcttcgacctggtggagaaattcgctggttacggatttaacaaaagccactctgcggcctatgctttggtgagttatcaaacgttatggctgaaagcgcactatcctgcggagtttatggcggcggtaatgaccgccgatatggacaacaccgagaaggtggtgggtctggtggatgagtgctggcggatggggctgaaaatcctgccaccagatataaactccggtctttaccatttccacgtcaacgacgacggcgaaatcgtgtatggtattggcgcgatcaaaggggtcggtgaaggtccgattgaggccatcatcgaagcccgtaataaaggcggctacttccgcgaactgtttgatctctgcgcccgtaccgacaccaaaaagttgaaccgtcgcgtgctggaaaaactgatcatgtccggggcgtttgaccgtcttgggccacatcgcgcagcgctgatgaacagcctgggcgatgcgttaaaagcggcagatcaacacgcgaaagcggaagctatcggtcaggccgatatgttcggcgtgctggccgaagagccggaacaaattgaacaatcctacgccagctgccaaccgtggccggagcaggtggtattagatggggaacgtgaaacgttaggcctgtacctgaccggacaccctatcaaccagtatttaaaagagattgagcgttatgtcggaggcgtaaggctgaaagacatgcacccgacagaacgtggtaaagtcatcacggctgcggggctcgttgttgccgcgcgggttatggtcaccaagcgcggcaatcgtatcggtatctgcacgctggatgaccgttccgggcggctggaagtgatgttgtttactgacgccctggataaataccagcaattgctggaaaaagaccgcatacttatcgtcagcggacaggtcagctttgatgacttcagcggtgggcttaaaatgaccgctcgcgaagtgatggatattgacgaagcccgggaaaaatatgctcgcgggcttgctatcagcctgacggacaggcaaattgatgaccagcttttaaaccgactccgtcagtctctggaaccccaccgctctgggacaattccagtacatctctactatcagagggcggatgcacgcgcgcggttgcgttttggcgcgacgtggcgtgtctctccgagcgatcgtttattaaacgatctccgtggcctcattggtagcgagcaggtggaactggagtttgactaatacaggaatactatgagtctgaatttccttgattttgaacagccgattgcagagctggaagcgaaaatcgattctctgactgcggttagccgtcaggatgagaaactggatattaacatcgatgaagaagtgcatcgtctgcgtgaaaaaagcgtagaactgacacgtaaaatcttcgccgatctcggtgcatggcagattgcgcaactggcacgccatccacagcgtccttataccctggattacgttcgcctggcatttgatgaatttgacgaactggctggcgaccgcgcgtatgcagacgataaagctatcgtcggtggtatcgcccgtctcgatggtcgtccggtgatgatcattggtcatcaaaaaggtcgtgaaaccaaagaaaaaattcgccgtaactttggtatgccagcgccagaaggttaccgcaaagcactgcgtctgatgcaaatggctgaacgctttaagatgcctatcatcacctttatcgacaccccgggggcttatcctggcgtgggcgcagaagagcgtggtcagtctgaagccattgcacgcaacctgcgtgaaatgtctcgcctcggcgtaccggtagtttgtacggttatcggtgaaggtggttctggcggtgcgctggcgattggcgtgggcgataaagtgaatatgctgcaatacagcacctattccgttatcagcccggaaggttgtgcgtccattctgtggaagagcgccgacaaagcgccgctggcggctgaagcgatgggtatcattgctccgcgtctgaaagaactgaaactgatcgactccatcatcccggaaccactgggtggtgctcaccgtaacccggaagcgatggcggcaagcttgaaagcgcaactgctggcggatctggccgatctcgacgtgttaagcactgaagatttaaaaaatcgtcgttatcagcgcctgatgagctacggttacgcgtaattcgcaaaagttctgaaaaagggtcacttcggtggcccttttttatcgccacggtttgagcaggctatgattaaggaaggattttccaggaggaacacatgaacatcattgccattatgggaccgcatggcgtcttttataaagatgagcccatcaaagaactggagagcgcgctggtggcgcaaggctttcagattatctggccacaaaacagcgttgatttgctgaaatttatcgagcataaccctcgaatttgcggcgtgatttttgactgggatgagtacagtctcgatttatgtagcgatatcaatcagcttaatgaatatctcccgctttatgccttcatcaacacccacagcacgatggatgtcagcgtgcaggatatgcggatggcgctctggttttttgaatatgcgctggggcaggcggaagatatcgccattcgtatgcgtcagtacaccgacgaatatcttgataacattacaccgccgttcacgaaagccttgtttacctacgtcaaagagcggaagtacaccttttgtacgccggggcatatgggcggcaccgcatatcaaaaaagcccggttggctgtctgttttatgatttttcggcgggaatactcttaaggctgatgtctctattagcgtcaccgagcttggtagcttgctcgaccacaccgggccacacctggaagcggaagagtacatcgcgcggacttttggcgcggaacagagttatatcgttaccaacggaacaagcacgagcaacaaaattgtgggtatgtacgccgcgccatccggcagtacgctgttgatcgaccgcaattgtcataaaagcctggcgcatctgttgatgatgaacgatgtagtgccagtctggctgaaaccgacgcgtaatgcgttggggattcttggtgggatcccgcgccgtgaatttactcgcgacagcatcgaagagaaagtcgctgctaccacgcaagcacaatggccggttcatgcggtgatcaccaactccacctatgatggcttgctctacaacaccgactggatcaaacagacgctggatgtcccgagcattcacttcgattctgcctgggtgccgtacacccattttcatccgatctaccagggtaaaagtggtatgagcggcgagcgtgttgcgggaaaagtgatcttcgaaacgcaaagcacccacaaaatgctggcggcgttaagccaggctagcctgatccacattaaaggcgagtatgacgaagaggcctttaacgaagcctttatgatgcataccaccaccagccccagttatcccattgttgctagcgttgagacggcggcggcgatgctgcgtggtaatccgggcaaacggctgattaaccgtagtgtagaacgagctctgcattttcgcaaagaggtccagcggctgcgggaagagtctgacggttggtttttcgatatctggcaaccgccgcaggtggatgaagccgaatgctggcccgttgcgcctggcgaacagtggcacggctttaacgatgcggatgccgatcatatgtttctcgatccggttaaagtcactattttgacaccggggatggacgagcagggcaatatgagcgaggaggggatcccggcggcgctggtagcaaaattcctcgacgaacgtgggatcgtagtagagaaaaccggcccttataacctgctgtttctctttagtattggcatcgataaaaccaaagcaatgggattattgcgtgggttgacggaattcaaacgctcttacgatctcaacctgcggatcaaaaatatgctacccgatctctatgcagaagatcccgatttctaccgcaatatgcgtattcaggatctggcacaagggatccataagctgattcgtaaacacgatcttcccggtttgatgttgcgggcattcgatactttgccggagatgatcatgacgccacatcaggcatggcaacgacaaattaaaggcgaagtagaaaccattgcgctggaacaactggtcggtagagtaagcgcaaatatgatcctgccttatccaccgggcgtaccgctgttgatgcctggagaaatgctgaccaaagagagccgcacagtactcgattttctactgatgctttgttccgtcgggcaacattaccccggttttgaaacggatattcacggcgcgaaacaggacgaagacggcgtttaccgcgtacgagtcctaaaaatggcgggataacttgccagagcggcttccgggcgagtaacgtgctgttaacaaataaaggagacgttatgctgggtttaaaacaggttcaccatattgcgattattgcgacggattatgcggtgagcaaagctttctactgcgatattcttggtttcacgctgcaaagcgaagtctatcgcgaagcgcgcgacagttggaaaggggatttggcgcttaatgggcaatatgtgattgagcttttcagttttccgttcccgccggaacgacccagccgaccggaagcttgcggtctgcgtcatctggcttttagcgttgatgacatcgatgcggcagtggcgcaccttgaaagccataacgtgaagtgtgaaaccatccgtgtcgatccatacacgcaaaaacgcttcaccttctttaacgatccggacgggctgccgttggaactgtatgagcagtaaggcttgtcatcgccgcatttgcccggtaacgtgccgggcattgctactgtaaaatcgcaccatcatgacactcacgctcaatagacaacttctcaccagtcgccagattctggtggcctttagcggcgggcttgactccaccgttctgctgcatcagttggtgcagtggcggacggaaaatccgggtgtcgctctgcgcgctattcatgtgcatcacggtttaagtgccaatgccgatgcctgggttacgcattgcgaaaacgtctgccaacagtggcaggtgccgctggtggtcgaacgcgtacaacttgcgcaagaaggactgggcattgaggcccaggcgcggcaggcacgttatcaggcatttgcccgcaccttgttgcccggtgaagtgctggtcaccgcgcaacatctcgacgatcaatgtgaaacctttctgctggcgctaaaacgcggcagtggccctgccgggcttagcgctatggcggaagtcagcgagtttgccggaacgcggcttattcgcccgttgctcgcccgcacgcggggggaactggtgcagtgggcgcgtcagtatgatttacgctggattgaagacgaaagtaatcaggacgacagttacgatcgtaactttctgcgcctgcgcgtagtgccgttattgcagcagcgttggccgcattttgccgaagcaacggcccgcagcgccgcactttgtgctgaacaagagagcctgctggatgaactgctggcagatgatttagcacactgtcaaagcccgcaggggacgctgcagattgtgccaatgctggcgatgagtgatgcccgccgcgcggcgattatccgccgctggctggcagggcagaatgcaccgatgccttcccgcgacgcgttggtgaggatctggcaggaagtggcgctggcgcgggaagatgccagtccctgtttacgtttgggcgcgtttgaaatccgacgctatcagagccaactgtggtggattaaatccgtcaccgggcaaagcgaaaacattgtgccgtggcagacgtggcttcaaccgctggaattaccggcggggctgggaagtgtacagcttaatgcgggaggcgatattcgccctccgcgtgcagacgaagcggtcagcgtgcgtttcaaagcgccaggattgctgcatattgtcgggcgtaacggcggacgtaagctaaagaaaatctggcaagagctgggcgtgccgccgtggctacgtgacaccacgccactgctgttttatggcgaaacgctgattgcggcggcaggggtatttgtgacgcaagaaggtgtggctgaaggtgagaatggcgtaagttttgtctggcagaaaacgcttagttaagtgaaagccggataagacgcatcaaacgtcgcatccggcgaaagtcaatcaggattcgcttaccaccaccgtaccgatttccgggtggctaaagctggtaattttatccagacgcagctcgcgggtttcgccagcggcctcgacgaccaggtactccacatttttgcgggagactaaatcactggcttttgcctgcaatttttcgccatctttcagctcaagtgtcagcattaaatgatgctggcaggcgagctcaagattatcgtaatcatcacaattgattggttgatacgtatcattcattgacataatcgctcaccagtaagtttgccgcagcgtatgctgctttttccctgacagcctcagaaagggcgtcgtcggcagccatttcattcagcactttcaaaacgcagcccagcgcgtccggaacgtatcctaagtctccgctggcgatttccgcgtaccgcttgcgtattaactcacaatatttttccacatgccctcctgtcagcactctgacttaaccgtggatgcaagtctaagcctacgaagataaactctgtttcgcaaggtgactataccacactcatttctgcaatatcagcgccgcaactgcacgtattccgttacaatggcctcctgattcgaaaggagttttcttatggcgcttaaagcgacaatttataaagcgacggttaatgtggccgatctcgaccgcaaccagtttctcgatgcctctctgacgctggcgcgccatcctagtgaaacccaggagcgtatgatgctgcgcttgctggcgtggctgaaatatgctgatgaacgtctgcaatttacccgtggtttgtgtgccgatgatgagccggaagcgtggctgcgtaacgatcacctgggcattgatttgtggattgagctggggctgccggatgagcggcggattaagaaagcctgcacccaggccgcagaagtggcgctgtttacctataatagtcgggcggcgcaaatctggtggcagcaaaatcagagcaaatgtgtgcagtttgccaatctttccgtctggtatctggacgatgaacaactggcgaaagtaagcgcctttgccgatcgtaccatgacgctgcaggcaacgattcaggatggcgtgatctggttaagcgatgataagaataatctggaagtgaacttaaccgcctggcaacaacctagttgaactaaaccgcctggcaacaaccttcatgattgtgatttcccgacatgttgctattcccgatggtgagcttgagatcaccgccattcgtgcgcagggcgcgggcgggcagcatgttaataagaccagtacggctattcatctgcgttttgacattcgggcgtccagcctgccagagtattacaaagagcgtctgctcgccgccagccatcatttgatcagcagtgatggcgtgattgtcattaaggcacaggaataccgcagtcaggaactgaaccgcgaagcagctctggcccggctggtggctatgattaaagaattaacaacagaaaaaaaagcccgacgacccacgcggcccacccgtgcaagcaaagagcgcaggctggcaagcaaagcacaaaaaagtagcgtgaaggcgatgcgcggcaaagtgcgcagcggtcgggaataaaaagaaggaatggatggtgaaaaaagcgatagtgacagcgatggctgtaatcagcctctttactctgatgggatgtaataatcgggccgaagtcgatacgctttctccggcgcaggctgccgaactgaaaccgatgccgcaaagttggcgcggcgtgctgccgtgtgccgattgcgaaggaatcgaaacctctctgttcctcgaaaaagacggaacatgggtgatgaatgagcgttatctcggtgctcgtgaagaaccttcctccttcgcttcctacggtacatgggcgcgaaccgctgacaagctggtattaaccgacagcaaaggtgaaaagagttattatcgggcgaaaggcgatgcgctggagatgctcgatcgtgaaggcaatccgattgaaagccagttcaactatacgctggaagcggcacaatccagtttacctatgacgccgatgaccctgcggggcatgtatttttatatggctgatgcggcgaccttcactgattgcgcgaccggaaaacgtttcatggtagcgaataacgcagagctggagcgtagctacctggctgcgcgcggtcacagtgaaaaaccggtgttactgagtgtagaaggtcactttacgcttgagggtaatccggataccggtgcgccgactaaagtattggcacccgatacggcagggaaattttaccccaaccaggattgcagtagtttggggcagtaacccgtcttgagacagaaacaaacgcaaaacaggccagaaggatatatttcaacattttgaatttgcacgttttttgtaggccggataaggcgtttacgccgcatccggcaatggtgctcaacgcctgatgcgacgctggcgcgtcttatcatgcctacaacccccctcataccttaaggcggataaggcatttactttatcaccgggtcaaaccaacaaagcgacccgccttgatataaatcccaggcttcaggtgcccaacatactgtaactgcgtttctggcttaaacgcagagacatcaccaatacgcatatgcatcagatcggcagggctaatccagccgctttgcgccagtgtaagtggatgcccggctttggcaaaggcatccgtgacaaattcgctacaaaaccagctctttttgtctccttcgcccacactgcttaactgcgctttcgccaggccgctgacgcactgttggcgaaaatcctcggagaacggattcagactgcacatctggcgagtcaccataaagggaataaattcgacaatgccgcgatagttataaccgctatctttgattttattggcaaacgcggtgatatctgtggcttgttgcggggtaagatccgggactcgtaagacgaaaagcttatcactatgcttcatcgcttttttaagggaaacgatctggacgccagcgcctgtcgcttctgcaacgttattatcacccagaaagattgcaacgtgactcacagaggaagtgctgaagacgcggattccaaaactggttaccccaaggctactggagaacagcaaatcgccgggtttgagatcaggtgccgttatttcttttatactttgttcggtgaaagagctttgatgctggaatttgacagcccatgtttttgcctcggcatctactgctgtggcacttgggtctggctggctgatatcaacggtacaagcgctaagtaaaagaaagctggggagaaacaggcggcagtacgcctttggtttatccattttatacaatccatgtaaaaaaagggccctgaaattcaggaccctttctggcatcagcctttaatctgtttcaccagatattcgacgatgtcaccagtcttaattaactgtttctcgccgttgcgacgatatttatattcgatatcgtcgttgtcgaggttacggtcgcccagcacaatagtgtgcggaataccgatcagttccatatcagcaaacatcacgcccggacgctctttgcggtcatccagcagcacttcgataccttgtgcacgcagttcgctgtacagtttctcagcaagctcttgtacgcggaaggatttgtgcatgttcatcggcagaatcgccacctggaacggcgcgatagcgtcaggccatacgatgcctcgttcgtcgtagttctgctcaatcgccgcagctaccacacgcgttaccccgataccgtagcaacccatcgtcaggatttggttacggccatcttcaccctgtacggaggctttcagtgcttcggagtacttggtacccagctggaagatgtgaccaacttcgataccacgtttgatcagcagcctaccctggccatccgggcttggatcgccagccaccacgttacggatatctgcaacttccggggtagcgacatcgcgatcccagttgatgccgaagtagtgtttaccatcgatgttagcaccagcagcgaaatcactcatcgccgcaacggtacggtcaatcaccaccggaatcggcatgtttaccggacccagactacccggaccggctttaaccacggcacgaatttcttcttcggtcgcgaaagtcagcgggcttgcaacctgcggcagtttttctgctttaacttcgttcagctcgtgatcaccgcgcaccagcagcgcaacctgcgggaagctgctgccttcaaccgctttaaccagcagagtcttaaccgttttctcaatcggcagattgaactgttcaaccagttccgcgatggttttcgcgttcggcgtatcaaccagcgtcatttcctgggtagcagcagcgcgcggttctttcggcgcgatagcttctgccagttcaatgttcgctgcatagtcagaggtgtcggagaagaccacatcgtcttcaccgctctgcgccagcacctggaattcgtgagaggcgctgccgccgatagaaccggtgtcggcttgtacggcgcggaaatccagccccatgcggctgaagattttgctgtaggccgcatacattgcatcgtaggtttcctgcagggattcctgagaagtatggaaagagtaagcatctttcatcaggaattcgcgggaacgcatgacgccgaaacgcggacgcacttcgtcgcggaacttggtctggatctgatagaagttcagcggcagctgtttgtaagagctaagctcgttacgaatcaggtcagtgataacttcttcatgagttgggccgagtacgaacggacgctcgccacggtcaacaaaacgcagcagttccggaccgtactgttcccaacgaccactctcttgccacaaatcggctggctgaaccaccggcatgctcacctcgatcgcaccggcgttgttcatctcttcacgcacgatgttttcgacttttttcagaacgcgcacgccggtcggcagccaggtatataacccggaggccagcttgcggatcatcccggcgcgcagcatcagctgatggctgatcacctcggcgtcggcaggtgtctccttgagagtggagagcaggtattggctagtacgcatgttgttacggttccagttggaaggtagaacaggctcaaggcgagcctgggacaaaaaaaagtgatttagtttaccagtgcaaaagaaatgtcaaaagagaagggcgtgaatttaacgcggttccagcgcaaagacttcaaaacctgcgtcggtgacgcgccagcgaacgttaaaatcatgtagccagacggcataggttttgcccgtttcctcacctttacgataggccgggcgcgggtcctgcgccagtacttcgcggataaacagcgttaactgcggataacgcttctccagcgtcaaaagctgcttttcgacctctgcggtaaaactcaccgccatctctgcagctggcgcactttgcgcatagctggcactggcatcgggaaggctttcggcaaaggggagatacggtttgatatccactaccggcgtaccatcgaccagatccagactgccgagcttcagaatcacgctgtctttatggcaaacaacctctttcagctctaccaggctcatgccaattgggttagggcggaaagtagagcgtgttgcgaaaacccccattctggcgttaccgccgaggcgcggtggacgcacagtcggacgccagccgccttccatcgtttgatgaaagacgaaaaggatccataaatggctgaacgcttccaggccgcgaacggcgtcggcctggttgtagggagcaatgagatgcagttcgccgttggcgctttttaccagacctggctggcgcggaacggcgaacttttctttataggggctgcgaataacgcctatttgctcgaactggaaactgctcatttcgccgtaatgttaagcgcagaaccgatacatacagcctgacgatagcagcctggcgtaccgctggtgacttcgcagctatgcagtaatacagcattggctttcattttagaggcgttgatttgcatccgcttacgtgcggttggaatgctcggcggagagtcctgattagaggcctggcaagagtcgccactgacttcaccgagatcgcggaacggtttgccgactaattcttctgcattggtataaattcggaccggcgtggcgcgcggcgctttcggttttgcaggctccgctttcggctggggtgcagtgctttgaacgggttcgacaggggatctgcttaacatggaacagccgcttagcatgagtgctactaaacagatcggtaaagcacgcatagtatttcctcaatgtatgatcaaaacgtcaatattgaatcaggagcttgtaaaaatgacaagacgggcaagcgcccgtcctgaatgatattacaaattgtggaaacagcctaaaaattaccagcctttaacagctccgccgttaaacactttgtttgctgcttcgtaaacttcgtcagactgataagcctggacgaatttcttcacgttctcggcgtctttgttatcttcacgcgtcacgatcaggtttacgtacggggactctttatcttcaacaaagataccgtctttcgccggagtcaggccaatctggctggcataggtggtattgataactgccagagcgatttgcgcgtcgtccagagaacgcggcagttgcggtgcttccagttcaacaattttcagatttttggggttctcaacaacatcaagaacggtcggcagcaggccaacgccatctttcagtttgatcaagcccactttttgcagcagcagcagactacgaccaaggttagttgggtcgtttggcacggcaacctggctaccatcctgcagttcatccagacttttgattttcttggagtaaccagcaatcggataaacaaaagtgttgcctactgcgaccagtttgtagccacgatctttcagttgctgatcaaggtacggtttatgctggaaggcgttggcgtcgatatcgcctttgctcaatgcttcgtttggcagaacatagtcgttgaaggttaccagctcaacgtccaggccatatttgtctttcgcaactttctgcgcgacttctgcaacctgctgttcggcaccaacaatcacgccgactttaatgtggtttggatctttttcatcctgaccgcagcctaccagtgccagacttccgatcagggctcccactgccgcaaaggttttgaatttgaacgccataccttattccttcttcaattatttatgttgtgttgaacgttacttgcgagtgacagcccggacgatgcggtcgcctgcgaactgaattaaataaaccagaatgaccagcaataccagtaccgtattcatcaccgtcgcgttatagccgatgtagccatactgatagccaatctgacctaaaccaccggcaccgactgcaccacccatcgcggaataaccgaccagggtaatcagggtgatagttgccgcattcaccagacccggcagcgcttccggtaacagcaccttacggacgatctgcatcggcgtggcacccattgcgcgggaagcttcaattaacccggttgggatctccagcagagcgttctcgaccatacgggcaataaacggtgctgcaccaacggttaacggaacaatcgctgcctgcaaaccaatgcttgtaccgacaataacgcgggtaaacggaatcatccatacaagcaagataatgaacgggatggaacggaaaatgttcacaatcgcagaaacggtacgatacagcttcgcgttagcaataatttgccccggacgcgtgacataaagcagaacgccaaccggcagaccaatcacaaagccaaaaaaaccggatacgaaggtcattgccagcgtttcccatacgccacgaaccagcagccacatcatcggctcagacataacccagtacctctacttttacatggtgttcctgcagccaggcaatggcggcttgcgtatcttgttgtgtgccgtgcatttcagtcagcatgatgccgaacttaacgccaccggcgtaatccatctgcgcgctaataatgttgttgttgacgttgaaacgacgcgcggtttcagaaagcagtggggcatcgacgctttgaccggtaaactccagacgcagcatcggcacgcagtcagtaaatggctccgcttgcagacgttcctggtaatcttccgggatatccagatgcagggtgctctgaataaacttctgcgccagcggcgttttcggatggctgaacacttcacttaccgtgtcctgctcgatcagttctccattgctgatgaccgccacgcaatcacaaatgcgcttcacaacgtccatttcgtgggtgatcaacagaatcgtcaaccccagacggcggttgatgtctttcagcagttcgagaatagaacgtgtcgttgccgggtccagcgcgctggtggcttcatcacacagcaatactttgggattgctggctaacgcacgggcaattgccacacgttgtttctgcccaccggaaagattgctcgggtagctatcatgcttatcgccaagaccaaccaaactcagcaattccgtcacgcgacgtttgacctcgtctttcggtgtgttgtccagctccagcggcagagccacgttgccaaaaacagtacggctagagagcaggttaaaatgctggaaaatcataccaatctggcggcgagctttggtcaactcggattcactcagcgtggtcagttcctggccatcgaccagcacgctaccctcggttgggcgctccagcaggtttacacaacgtataagcgtactcttacccgcgccactggcaccgataacgccataaatttgtccagctggcacatgcaggctgacgttgttcaacgcctggatggtgcgggtgccctggtggaacactttggtgatattgctaagttttatcattgattatttattatcgtcattaagttagtcgtggcatctcgaatgcctgaaacgggcaacgccgtcaatgaaatggatgttaaggcatccagacgtctaaatcaatcaggtttatgcgaagagcactttcttgcaggtcgaaacatgcgatactagcgtcacatgccttattaaggagctataaaaggtggcgaagagcgtacccgcaatttttcttgaccgtgatggcaccattaatgtcgatcacggctatgtccatgagatcgacaactttgaatttatcgacggtgttattgacgccatgcgcgagctaaaaaaaatgggctttgcgctggtggtagtaaccaaccagtctggcattgctcgcggtaaatttaccgaagcacagtttgaaacgctgaccgagtggatggactggagcctggcggaccgagatgtcgatctggatggtatctattattgcccgcatcatccgcagggtagtgttgaagagtttcgccaggtctgcgattgccgcaaaccacatccggggatgcttttgagtgcacgcgattatttgcatattgatatggccgcttcttatatggtgggcgataaattagaagatatgcaggcagcggttgcggcgaacgtgggaacaaaagtgctggtgcgtacgggtaaacctattacgcctgaagcagaaaacgcggcggattgggtgttaaatagcctggcagacctgccgcaagcgataaaaaagcagcaaaaaccggcacaatgattaaaagatgagcggttgaaataaaaatgcatttttccgcttgtcttcctgagccgactccctataatgcgcctccatcgacacggcggatgtgaatcacttcacacaaacagccggttcggttgaagagaaaaatcctgaaattcagggttgactctgaaagaggaaagcgtaatatacgccacctcgcgacagtgagctgaaagccgcgtcgcaactgctctttaacaatttatcagacaatctgtgtgggcactcgaagatacggattcttaacgtcgcaagacgaaaaatgaataccaagtctcaagagtgaacacgtaattcattacaaagtttaattctttgagcatcaaacttttaaattgaagagtttgatcatggctcagattgaacgctggcggcaggcctaacacatgcaagtcgaacggtaacaggaagaagcttgcttctttgctgacgagtggcggacgggtgagtaatgtctgggaaactgcctgatggagggggataactactggaaacggtagctaataccgcataacgtcgcaagaccaaagagggggaccttcgggcctcttgccatcggatgtgcccagatgggattagctagtaggtggggtaacggctcacctaggcgacgatccctagctggtctgagaggatgaccagccacactggaactgagacacggtccagactcctacgggaggcagcagtggggaatattgcacaatgggcgcaagcctgatgcagccatgccgcgtgtatgaagaaggccttcgggttgtaaagtactttcagcggggaggaagggagtaaagttaatacctttgctcattgacgttacccgcagaagaagcaccggctaactccgtgccagcagccgcggtaatacggagggtgcaagcgttaatcggaattactgggcgtaaagcgcacgcaggcggtttgttaagtcagatgtgaaatccccgggctcaacctgggaactgcatctgatactggcaagcttgagtctcgtagaggggggtagaattccaggtgtagcggtgaaatgcgtagagatctggaggaataccggtggcgaaggcggccccctggacgaagactgacgctcaggtgcgaaagcgtggggagcaaacaggattagataccctggtagtccacgccgtaaacgatgtcgacttggaggttgtgcccttgaggcgtggcttccggagctaacgcgttaagtcgaccgcctggggagtacggccgcaaggttaaaactcaaatgaattgacgggggcccgcacaagcggtggagcatgtggtttaattcgatgcaacgcgaagaaccttacctggtcttgacatccacagaactttccagagatggattggtgccttcgggaactgtgagacaggtgctgcatggctgtcgtcagctcgtgttgtgaaatgttgggttaagtcccgcaacgagcgcaacccttatcttttgttgccagcggtccggccgggaactcaaaggagactgccagtgataaactggaggaaggtggggatgacgtcaagtcatcatggcccttacgaccagggctacacacgtgctacaatggcgcatacaaagagaagcgacctcgcgagagcaagcggacctcataaagtgcgtcgtagtccggattggagtctgcaactcgactccatgaagtcggaatcgctagtaatcgtggatcagaatgccacggtgaatacgttcccgggccttgtacacaccgcccgtcacaccatgggagtgggttgcaaaagaagtaggtagcttaaccttcgggagggcgcttaccactttgtgattcatgactggggtgaagtcgtaacaaggtaaccgtaggggaacctgcggttggatcacctccttaccttaaagaagcgtactttgcagtgctcacacagattgtctgatgaaaatgagcagtaaaacctctacaggcttgtagctcaggtggttagagcgcacccctgataagggtgaggtcggtggttcaagtccactcaggcctaccaaatttgcacggcaaatttgaagaggttttaactacatgttatggggctatagctcagctgggagagcgcctgctttgcacgcaggaggtctgcggttcgatcccgcatagctccaccatctctgtagtggttaaataaaaaatacttcagagtgtacctgcaaaggttcactgcgaagttttgctctttaaaaatctggatcaagctgaaaattgaaacactgaacaatgaaagttgttcgtgagtctctcaaattttcgcaacacgatgatggatcgcaagaaacatcttcgggttgtgaggttaagcgactaagcgtacacggtggatgccctggcagtcagaggcgatgaaggacgtgctaatctgcgataagcgtcggtaaggtgatatgaaccgttataaccggcgatttccgaatggggaaacccagtgtgtttcgacacactatcattaactgaatccataggttaatgaggcgaaccgggggaactgaaacatctaagtaccccgaggaaaagaaatcaaccgagattcccccagtagcggcgagcgaacggggaggagcccagagcctgaatcagtgtgtgtgttagtggaagcgtctggaaaggcgcgcgatacagggtgacagccccgtacacaaaaatgcacatgctgtgagctcgatgagtagggcgggacacgtggtatcctgtctgaatatgggggggaccatcctccaaggctaaatactcctgactgaccgatagtgaaccagtaccgtgagggaaaggcgaaaagaaccccggcgaggggagtgaaaaagaacctgaaaccgtgtacgtacaagcagtgggagcatgcttaggcgtgtgactgcgtaccttttgtataatgggtcagcgacttatattctgtagcaaggttaaccgaataggggagccgaagggaaaccgagtcttaactgggcgttaagttgcagggtatagacccgaaacccggtgatctagccatgggcaggttgaaggttgggtaacactaactggaggaccgaaccgactaatgttgaaaaattagcggatgacttgtggctgggggtgaaaggccaatcaaaccgggagatagctggttctccccgaaagctatttaggtagcgcctcgtgaactcatctccgggggtagagcactgtttcggcaagggggtcatcccgacttaccaacccgatgcaaactgcgaataccggagaatgttatcacgggagacacacggcgggtgctaacgtccgtcgtgaagagggaaacaacccagaccgccagctaaggtcccaaagtcatggttaagtgggaaacgatgtgggaaggcccagacagccaggatgttggcttagaagcagccatcatttaaagaaagcgtaatagctcactggtcgagtcggcctgcgcggaagatgtaacggggctaaaccatgcaccgaagctgcggcagcgacgcttatgcgttgttgggtaggggagcgttctgtaagcctgtgaaggtgtactgtgaggtatgctggaggtatcagaagtgcgaatgctgacataagtaacgataaagcgggtgaaaagcccgctcgccggaagaccaagggttcctgtccaacgttaatcggggcagggtgagtcgacccctaaggcgaggccgaaaggcgtagtcgatgggaaacaggttaatattcctgtacttggtgttactgcgaaggggggacggagaaggctatgttggccgggcgacggttgtcccggtttaagcgtgtaggctggttttccaggcaaatccggaaaatcaaggctgaggcgtgatgacgaggcactacggtgctgaagcaacaaatgccctgcttccaggaaaagcctctaagcatcaggtaacatcaaatcgtaccccaaaccgacacaggtggtcaggtagagaataccaaggcgcttgagagaactcgggtgaaggaactaggcaaaatggtgccgtaacttcgggagaaggcacgctgatatgtaggtgaagcgacttgctcgtggagctgaaatcagtcgaagataccagctggctgcaactgtttattaaaaacacagcactgtgcaaacacgaaagtggacgtatacggtgtgacgcctgcccggtgccggaaggttaattgatggggttagcgcaagcgaagctcttgatcgaagccccggtaaacggcggccgtaactataacggtcctaaggtagcgaaattccttgtcgggtaagttccgacctgcacgaatggcgtaatgatggccaggctgtctccacccgagactcagtgaaattgaactcgctgtgaagatgcagtgtacccgcggcaagacggaaagaccccgtgaacctttactatagcttgacactgaacattgagccttgatgtgtaggataggtgggaggctttgaagtgtggacgccagtctgcatggagccgaccttgaaataccaccctttaatgtttgatgttctaacgttgacccgtaatccgggttgcggacagtgtctggtgggtagtttgactggggcggtctcctcctaaagagtaacggaggagcacgaaggttggctaatcctggtcggacatcaggaggttagtgcaatggcataagccagcttgactgcgagcgtgacggcgcgagcaggtgcgaaagcaggtcatagtgatccggtggttctgaatggaagggccatcgctcaacggataaaaggtactccggggataacaggctgataccgcccaagagttcatatcgacggcggtgtttggcacctcgatgtcggctcatcacatcctggggctgaagtaggtcccaagggtatggctgttcgccatttaaagtggtacgcgagctgggtttagaacgtcgtgagacagttcggtccctatctgccgtgggcgctggagaactgaggggggctgctcctagtacgagaggaccggagtggacgcatcactggtgttcgggttgtcatgccaatggcactgcccggtagctaaatgcggaagagataagtgctgaaagcatctaagcacgaaacttgccccgagatgagttctccctgactccttgagagtcctgaaggaacgttgaagacgacgacgttgataggccgggtgtgtaagcgcagcgatgcgttgagctaaccggtactaatgaaccgtgaggcttaaccttacaacgccgaagctgttttggcggattgagagaagattttcagcctgatacagattaaatcagaacgcagaagcggtctgataaaacagaatttgcctggcggccgtagcgcggtggtcccacctgaccccatgccgaactcagaagtgaaacgccgtagcgccgatggtagtgtggggtctccccatgcgagagtagggaactgccaggcatcaaattaagcagtaagccggtcataaaaccggtggttgtaaaagaattcggtggagcggtagttcagtcggttagaatacctgcctgtcacgcagggggtcgcgggttcgagtcccgtccgttccgccacttattaagaagcctcgagttaacgctcgaggttttttttcgtctgtatatctattattgccagaatcgcaaaaatcctctgcattttacgctctttttcctcaacagtctgaagcccataatcacctcagttaacgaaaatagcattaaaagaggcatattatggctatccctgcatttggtttaggtactttccgtctgaaagacgacgttgttattagttctgtgataacggcgcttgaacttggttatcgcgcaattgataccgcacaaatctatgataacgaagccgcagtaggtcaggcgattgcagaaagtggcgtgccacgtcatgaactctacatcaccactaaaatctggattgaaaatctcagcaaagacaaattgatcccaagtctgaaagagagcctgcaaaaattgcgtaccgattatgttgatctgacgctaatccactggccgagtccagacgatgaagtctctgttgaagagtttatgcaggcgctgctggaagccaaaaaacaagggctgacgcgtgagatcggtatttccaacttcacgatcccgttgatggaaaaagcgattgctgctgttggtgctgaaaacatcgctactaaccagattgaactctctccttatctgcaaaaccgtaaagtggttgcctgggctaaacagcacggcatccatattacttcctatatgacgctggcgtatggtaaggccctgaaagatgaggttattgctcgtatcgcagctaaacacaatgcgactccggcacaagtgattctggcgtgggctatgggggaaggttacagtgtaattccttcttctactaaacgtaaaaacctggaaagtaatcttaaggcacaaaatttacagcttgatgccgaagataaaaaagcgatcgccgcactggattgcaacgaccgcctggttagcccggaaggtctggctcctgaatgggattaagcctctctgacagctcctccgggagctgtttttacatgctcgctaaggaaatcgataaaagcccggatgcgcgtacttaccgcacggtcgctgtaatagacggcactgaatggcatttccactggcaacactttatctgccattaactccaccaattctccgcgagcgatttctttgtcgatcatgtagtcggacaaacacgcaatcccgttgccactcaggcaaagctgtttcagtgtttccccactattggaactcaaaccgtacttcacctcatgtaattgtccatcgctacgggctatcggccaggtattgagggaagcgggttcagtgaatcccaggcaaatatgttgctttaaatcgtcgatcgtttctggcttcccgtagcgggaaatataatcgggggaggcgataatttttcgataactgttaaataacggcctggcacgtaagctggaatccgttaacgtaccagcgcgtatcgcgacatccacttttctttcgatcaaattaataatcgtttcggaggagactaggctcaaagtgacttccggatagcgttcacggaaaggcttaattaacggcatcagaaagtgcagcaccactggagttgcggcatcgatccgtaacagtccacgcggtgtattacgcgtctccataatttcactttctgccgctgccatctcctgcaaaatactctgtacgcgacgaaaataacgctcgccttcttccgtcaggctaagttgtcgcgtggtccgattaagcaggctaacgccaagtttcatctccagctttttcaccgcccggcttaccgcactgtttgcttgccctaattgttccgctgcccggctaaagctgccgctttcgacgacgctaacaaaaatggcgagttcttcgctcgtggctttcatttttgctcctgttgcaaaatagaagagatattttgaatttatttgtcattaaaccatcaggatgcgtgatatgtcatgcgatttaatgttctccataatgagcaaaattctgaccggtgtaagcacttgcttacataacaatatacaattgctcgttgaaagagtgagctaaaatccctataacagtagaaccctcccgagtgcggaagggttgacgtaatagaggtttcaaagtcaaaagtgcgaaaaaacacctatgccatgcgctatgttgccggacaacctgcggaaaggatcttaccgccggggtcttttgcgagcatcggccaggcattaccacctggggaaccgttaagtaccgaagagcgtattcggatcctggtgtggaacatatacaaacagcaacgcgctgaatggttgagcgtattaaagaactacggcaaagatgcacatctggtgttattgcaggaagcgcagacaacgccagagttagtacagtttgcgaccgctaactatcttgccgccgatcaggtacccgctttcgtgctgccacaacatccttctggcgtaatgacccttagcgcggcacatccagtgtattgctgcccgttacgtgaacgagaacccattttgcgtctggcgaagagcgcactggtgacggtctatccattacctgacacccgcctgttgatggtggttaatatacacgccgtcaacttcagtctgggcgtggatgtctatagtaagcagttacttcctattggcgatcagatagctcaccacagcggcccggtcattatggcgggagatttcaatgcctggagccgtagaaggatgaacgcgttatatcgctttgcgcgggaaatgagcctgcgccaggtgcgttttaccgatgatcagcgccgtcgggcgtttggtcgcccgctcgattttgttttctaccgtggtctgaacgtcagtgaagcttctgtactggttacgcgcgcttccgatcacaatccgctactcgttgaattcagtcccggcaagcctgataaataaggtatgagtggtctgccacagggcagaccaacgtttggcgctgcgcaaaacgtgagcgcggtggtggcgtatgacttatctgcccacatgctggatgtcgtggcacaagctgccgaagcccggcaactgaaaaatatcaccacccgccagggatatgccgaaagtctgccatttgccgataacgcatttgatattgttatcagccgttattctgcccatcactggcatgatgttggtgcagcactgcgagaagtgaataggatattgaaacctggcggtaggctgattgtgatggacgtaatgtctccgggtcacccagtgcgcgacatctggttacagacggtagaagcattacgcgatacctctcacgtacgaaactacgccagcggtgagtggttgacgttaatcaatgaagccaatctgatagttgataatttaattacagataagttaccgctggaattttctagttgggtcgcgagaatgcgtacgccagaagcgttagtagacgctattcgcatttaccaacagagcgcaagcacagaggtgagaacgtattttgccttgcagaatgatggctttttcaccagtgatatcatcatggtagatgcacataaagcggcataaataaaaaaggcaccgggggaatcggtgcctttttattatctggtttgtcaggaatctggcatgttgttgtttttcacaaacaacgtcagcttatcgcctggttgcagattcgcagtgtcgctgttccagcgcatcacatctttgatgttcacgccgtggcgtttagcaatgctactaaggctatcgcctttgcgcacacgatacgtaatgctatcgctgttgtttgccagtcgctgtgcgctactgcctgcaccaatcgtcaaactttggcctggcttcagcttagatccgcgcagtttgttccactgctgcaaatctttggtgcttacgccgagacgactagcgatactactaagcgtgtcgccagagcgtacggtgtaaacacggctgttaagcggcgtattgtcggcaaccagcgtgctctgtacagcagcaatttcgccactagccagagattcacgcagttgatctgcatgcttctttggcaccatcacgtactgcgggccacttgcgcccagcgtggagccttttacgccagcgttgaatgtcttcagcttgctgacggaaatccccgccatatctgctaccttcgccatttcaaccgggctgctcaggtgcacacgcgccagagcacggctttcatcggtcgttggcagacgtacgccataacgcttgctgtttttgagaatatcactcaatgccagcattttaggcacgtactgcttcgtttcctgcggcaacggtaagctccagaagtccgtggatttcccacgcgctttgttcgttttaattgccttcatgacccgaccttcgccgctgttataagccgctacggtcagaagccagtcgccgtcaaacattttgttcagacgctgcatcatattcagcgcggcagttgcactagcaacaacatcgcgacgcgcgtcataattgcgggtctgtttcaaaccataattgcgccccgtgctcggaatgatctgccagatgcctgcggcattggcgccagacgttgcgtgaggatcaaaagcgctctccactatgggtagtagtaccagttccataggcatgttacgttttttaacttgccctgctatccagtacatatacggctctgcccgtaaagttacatcgtggagatagctcttattgcgtaaatatttctgtttctgttcgcgaatccggtcattttccggaattcccatctttagctcgtcgccaatgaaagcccacaagtcaccatctggcgcgatagacgtcccatcgtccatccatcgtgcctgacttgtaaactttgctgcttccccttgaccagctgcagaaaggctctgtgcgtgctgttgaacgttgccggtactctggcaacccacgagcaggacagaggcgagtaatatcgcttttgccttcatgtgtgtgtcaatagttgcttaaaagacgaccgatcataacggcgaacggagccgatgacaagaaagttttatcagaacctatctttcttactccttaaccatgcaaaacgctcttcaggttgttgcaataatgtttcttcattaattacattaattaaatcaatatcttccgttcttaaaaaaacattaatttgccgctcatttttcagaattacgggtagtgttatttgattttttgcccgtaactccttaactttacgataataatcatttatggacaaatcgtgcggaagaatactcaaagcaaacttcatattacttaaggtatattcatgagcacaacataccaatgtatcgtcaggtaacgcacttaactttttaagactttgatacatttgacttgctgtcccttcaaacaaccgaccacacccaccagaaaacagtgtgtcgccgcaaaatagataaggtttactgaagtaacagatatgtcctaaagtgtgacccggcgtagcaattacactaaattcatgccccaaaacgaaggcagtttcgccatctttgactacctgtgttgttcccttatcttgtgtctcttgtggaccatacaccacaatttgtggaaacttttccaccagttcttttacgccgccaacgtgatcgtggtgatggtgggtgagaaatatggcctccggttgccagttattggcggcaatggcgtttaatactggctctgcgtctccgggatcgacaatcaggcagcgacctgcttcatcattcaaaacccagatgtaattgtcatcaaaggcgggaatactgttaagattcatagattacctctcagtgtgaaacggaaggttgtgatgaaaccggcaagagtccctcaaactgtcgtggctcctgattgctggggcgatttgccctggggaaagctttatcgcaaggcgctggagcgccagctcaacccgtggttcactaaaatgtatggttttcatctgcttaagattggcaatttaagcgcagaaatcaattgcgaagcgtgcgcggtttctcatcaagtgaatgtttctgcgcaaggaatgcccgtccaggtacaggcggacccacttcatcttccttttgccgataaatccgttgatgtttgtctactggcacatacattgccgtggtgcaccgatccgcatcgtttattgcgtgaagccgatcgggtattgattgatgatggctggctggtcattagtggcttcaatcccatcagttttatgggattacgcaaacttgtgccggtattgcgcaaaaccagcccctataacagccggatgtttactctgatgcggcagctggactggctctctttgttgaattttgaagtgctacacgccagccgtttccacgttctcccgtggaacaaacacggaggaaaactattgaatgcgcatattcctgcgcttggttgcttacaacttattgttgcccggaaacggactattcctttaacgctaaatccgatgaaacagagtaaaaacaagccacgaattcgccaggcggttggagccacccggcaatgtcgtaaaccacaggcttaaacttcaacttggtagcctgtatcttccagtgtgggattcatcgccgcggcacgagccagttcatcacagcgttcgttttccgggtgtccggcatggcctttaacccattcccatttgatttgatgctgccccaatgcagcatcaagacgttgccagagatcgacattttttactggttttttgtctgcggttttccagccacgttttttccagttatggatccactgggtgataccctggcggacatactggctgtcggtactcaaaatgacttcgcaatgttcttttaacgcctccagcgcgacaatagcggccatcaactccatacggttgttggtggtgcgggtgtagccagcgctaaaggttttctcgcgtccgcgatagcgtaaaatagcgccgtaacccccaggtcctggattgcccagacagctaccatcggtgaaaatttctacctgtttaagcatctctggtagacttcctgtaattgaatcgaactgtaaaacgacaagtctgacataaatgaccgctatgagcactgcaattacacgccagatcgttctcgataccgaaaccaccggtatgaaccagattggtgcgcactatgaaggccacaagatcattgagattggtgccgttgaagtggtgaaccgtcgcctgacgggcaataacttccatgtttatctcaaacccgatcggctggtggatccggaagcctttggcgtacatggtattgccgatgaatttttgctcgataagcccacgtttgccgaagtagccgatgagttcatggactatattcgcggcgcggagttggtgatccataacgcagcgttcgatatcggctttatggactacgagtttagcttgcttaagcgcgatattccgaagaccaatactttctgtaaggtcaccgatagccttgcggtggcgaggaaaatgtttcccggtaagcgcaacagcctcgatgcgttatgtgctcgctacgaaatagataacagtaaacgaacgctgcacggggcattactcgatgcccagatccttgcggaagtttatctggcgatgaccggtggtcaaacgagcatggcttttgcgatggaaggagagacacaacagcaacaaggtgaagcaacaattcagcgcattgtacgtcaggcaagtaagttacgcgttgtttttgcgacagatgaagagattgcagctcatgaagcccgtctcgatctggtgcagaagaaaggcggaagttgcctctggcgagcataaatacctgtgaaaggcgctaaaaatagcgacttgggcgatttttgcagcaaacgattcaaaagatgagaaaaaccgttgacgaaggtcgaggcaatccgtaatattcgcctcgttcccaacggaacacaacgcggagcggtagttcagtcggttagaatacctgcctgtcacgcagggggtcgcgggttcgagtcccgtccgttccgccactattcactcatgaaaatgagttcagagagccgcaagatttttaattttgcggtttttttgtatttgaattccaccatttctctgttcaatgattttactctggcgtaggtgcgtgattctcgcttgttgtctcattcattaaaattcaataatgatatcgaaccattcagcttaaatatatttctagagaataaatttatattgattaaatgaatgtatatttcaaattgattttgtttgttattatttaagtgaggtatataattagagtccgttatcaatgctaaatattctaatcattatgacaggcgagggagtgtccaattatgaatagtaaaaagctttgttgcatatgtgtgttattcagcctgcttgcaggatgtgcctctgaatcttctattgatgaaaagaagaaaaaagctcaagtcacacaaagtaatattaataaaaacactccccagcaactgacagacaaagatttattcggtaatgaaaccactctggccgtatccgaagaggatattcaagctgcgcttgatggagatgagttccgcgttccccttaattctcctgtaatacttgttcaatccggcaaccgcgcaccggaaaccattatgcaggaggagatgcgaaaatattatactgtttccacattctctggtatcccggacaggcaaaagcctctgacttgtaacaaaaacaaagataaaaatgagaacgaggatgttgccagtgctgagaatatgaactggatgcaggcactgcgttttgtggctgcaaaaggacatcagaaagcgattattgtttaccaggatatgttgcagacaggaaaatatgactctgcgctgaaaagtacagtatggtccgactataaaaatgacaaactcactgacgctatctccctgcgctacctggtacgtttcacgctggtggatgtggcaacaggtgagtgggctacctggagcccggtgaattatgaatataaagtgcttccaccattgcccgacaagaatgaagccagtacgactgatatgacagagcagcaaatcatgcaacttaagcaaaagacctataaagcgatggtaaaagatttggttaaccgctatcaataataaattatatctgccgccaggaatttctggcggcaataatacaaaattctttgcataagaaatttttcttgacaaagacagtgcaagaaaggacatggaatccggagttaaaaactgtttgttttagaatatttaattatttaactgctgaatcttccttgcgagaaatatatccattattacatttcatgccatttttaatatagattgctcctgggaaaattcccgtattattaccgcaggggtgataattagtattgacatatcctgtgacaaaaggagctattaaaggtgctattacgatagctattagtaaaaatataagagttagctgtattgttatgtctgtggcgaaattgactaccttcgtttttttgattaagaatgattttattatcgtaagtaaaattacatgaatatttaaaaaggaaaacgacatgaaaccgaagcacagaatcaacattctccaatcataaaatatttccgtggagcattttattattgaatatagaggtttaactccggtaaaaaacaaagaagcattgaatgcagggaaaaataatatggccataaaaaacatcgaaagaaactcttttaatttaacatgtaaacgcatggttaatcctcatatcacgggtggagtgttaagaacatacataaatggagtcatgttttcccttttccatttatcaagttcctgttgccgttttagtccatctctaattgcatattttaatttttcacttaaatggcattgagcatcgatttcatttaaaacaactgtacacactatccctgtcagtaaaattgctcctccgacaagaattactggaaagccaaagctaacacaggcaaaagaagccagacttccaatagcggttgcaacaccaccggctataactgctttggccacatccatactaaaatcgccaagaaaattaaccagatctcgctcactactcataataaattctatggttctgctgatttaaccgcagagaagttcgccacagcaatccgaaaccactggcacgtggagaataagctgcacaggcgtctggacgtggtaatgaatgaagacgactacaaaataagaagaggaaacgcagcagaattatttagtgggatacggcacattgctattaatattttgacgaatgagaaggtattcaaggcagggttaagacgtaagatgcgaaaagcagccatggacagaaactacctggcgagtgtccttgcggggagcgggcttagctaataataccccgactctccccgtccttaaacacaacccccactcaccacaacctaaactcatccgcatcctgccatgccggaaacttttctctatattcccgcaatgctgccatgctcagctccgcatcaatgcgcgttgcctgatgcgcgtcggcagtagcgataatctctccttgcggattaatcacccggctgtcaccgcgataatggcagccgttgccatcgctgccgacgcgattgcatcccgccacatacgcctgattctcaatcgcgcgggccgtcagcaatgcctgccagtgcagagagcgcggagcaggccagttggcgacgtacagggcgaggtcataatcgttgagattgcggctccacacaggaaaacgtaagtcgtagcacaccagcggcaaaatacgccagccgcgccattccacaatcactcgcgcattgcccgctttataatgtagatgctcatctgccatgcggaacagatgacgcttatcataaaaatgtaccgtgccgcccggctcaaccagcaaaaagcggttaacgctaccagactccgtttgtaatgcaacactgcctgcaatcagcgcattgcactgctgcgccttagctgtcatccagttcactacgtcatcttgtgctaggctgctagctgccgcttccatggcaaagccgctggtaaacatctccggtagaacgatcacatcgcgcccggtaataccttccagttgacgatcaaaatgacgcaggttggcaggaccatccatccacaccagtggttgctgcaaaagcgtaatcttcaaaccaggcacggtgtacaactcctttatgcgaagggttttataactttaacaccttatcaggcagttgccttagcgcagaataaattgataacaaatgctgatattggaaatatctgatttgcaaattatcgtgttatcgccaggctttaggaggttaataacatgggcaggataagcagcggaggaatgatgtttaaggcaataacgacagtcgccgctctggtcatcgccaccagtgcaatggcgcaggatgatttaaccattagcagccttgcaaagggcgaaaccaccaaagctgcatttaatcagatggtacaagggcataagctgcctgcctgggtgatgaaaggcggtacttatactcccgcacaaaccgtaacgttgggagatgagacgtatcaggtgatgagcgcgtgcaaaccgcatgactgtggcagccaacgtatcgctgtgatgtggtccgagaaatctaatcagatgacggggctgttcagcactattgatgagaaaacgagccaagagaaactcacctggctgaatgtgaacgatgcgcttagcattgatggtaaaacggtgttgttcgcggcgttgaccggcagcctggaaaaccatccggatggctttaattttaaataattagcggataaagaaacggagcctttcggctccgttattcatttacgcggcttcaactttccgcactttctccggcaactttaccggcttcgtcgccagctcttccggatcaaagtcatcaacgttaatactgcgcagacggctttcttcagctttcaccagaatagcggcttcatctttatcaatcagccccttcaccagcgcgttgtgcgccagttcatccagacgggtaaacggcaggtttttacccagctctttacagatccgctgatgaattgggtcggcggcaatcacatccaccagcgcctcttccagcaagccaaccggattatgctcgctcggcgtcaggtactgaccgcgaccaatgcgggaacgggtggcgttcggcacttgtaaaatcttcgccactttatgatccagcttgtcagaaggtgccagataatgacgtccggtcgggaagatcaccacattcagcagcccggcaaccacgcggttcgggaagttttgcagtaaatcatccatcgcctgttcagcctgatacagcgcatcttgtacgccccagtgcaccagcggcaggtcggcttcattacggccttcgtcgtcataacgcttcagcacggcagaggcgaggtagagctggcttaaaatatcccccagacgggcgctgatgcgctcgcgacgtttcaggctgccgcccagcactgccatgctgacatcagaaagcagggcgaggttggcgctcaggcggttcaggtgctgatagtagcgtttagtggcatcgccggttggcgtgctgctggttaaaccgcgcgtcaggcccagccagaagctgcgaactttgttgctaccgacgtgaccgatatgtttgaacaacagtttatcgaacgcgttgacgtcattgttcttcgccgcttccatctcttccagcacgtacggatggcaacgaatcgctccttgtccgaagatcatcatgctgcgggtcagaatgttagccccttcaacggtgatggcaatcggtgcgccctggtaagcacgcgccaggaagttgctttgcccgagcataatgcctttaccgccggtaatatccatcgcatcaataatgttctgctgcccgcggtgggtacagtgatacttaacgatagcgctcagcacggcaggtttttcgccgagcataatgccgtaggtaatcaggcttgccgcagcatccatcacgtaggcattaccggcaatacgcgccagcggctcttcaatcccttccatcttaccaatagagattttgaactgacggcgaatgtgagcatacgcgccggttgccagcgctacgcttttcacgccgccggtactgttggaaggcagggtgatgccgcggcctacgctgaggcactccaccagcatccgccagccttgcccggccattttcggcccgccgatgatgtaatcgatcggcacgaagacatctttaccgcgcgtcggtccgttctggaacggtacgttcagcgggaagtggcgacgaccaatttccacgcccggcgtggtggttgggatcagcgcacaggtaatgcctaaatcttctgcaccgccgagtaatttttccgggtcggagagtttaaacgccagcccaagcacggtcgcaatcggtgccagcgtaatgtagcgtttgttccaggtcagacgcatccccagcacctgctggccctgccattcgcccatgcagacaatcccggtgtccggaatcgcgcccgcatcggaacccgcttccgggctggtcagtgcaaagcaggggatctcctgaccacgcgccagacgcggcagatagtgatctttctgctcgtcagtgccgtaatgttgcaacagttcgcccgggcctaaactgtttggcacgccgacggtaatcgccaggatcccgctcacgccggagagtttttgcagcacgcgagactgggcataagcgctgaactccagcccgccgtactcttttttgatgatcatcgcgaagaaacgatgctctttaaggtacgcccacaactccggcggcagatccgccagctcatgggtgatctggaaatcattcgccatccggcaggcttcttctaccgggccgtcgagaaacgcttgctcttcggcggtcaggcgcggctgcggatagttatgcagctttttccagtccggcttgccctggaacaagtcgccctcccaccaggtggtgcccgcatcaatcgcttctttctcagtgcggctcatcggcggcatcaccttacggaaaccgcgaaataccggcgcggaaatcatgctcttacgcataggcgcaaagttaaatggcacgaggataatggccagaggcaccagtacccacgcgctccacagaccagcaacgccgagggcggctgtccaggcgagcaaaatcagactgctgataaataagctcacgcggtgatagaacaacgcgccgagcaggacaaccgtagcgagaatactcaaaatcatcataacgaaaagccccttacttgtaggaggtctgaccacttgtgatgatatggttgtagtggatgtaaaaacatttagcaatatgtttacaatataattacaacaaagctcacattgttgctgtttttatccgcacttcaggtcaaaaagtcctggtcatagcacctgcccgtacttctcgcttttggcggtatccggtacactgcattttgtctattacatttatgctgaaggatatcctcatgtaccaggatcttattcgtaacgaactgaacgaagcggcggaaacgctggctaactttttaaaagatgacgccaatattcacgccattcagcgcgcggcggtcctgttagcagacagctttaaagccggtggcaaagtgctttcctgcggcaacggcggttcccattgcgacgctatgcactttgccgaagagttgaccggtcgctaccgtgaaaaccgtccgggctacccggcgattgctatttctgacgttagtcatatttcctgcgtcggtaatgatttcggtttcaatgatattttctcccgctacgttgaagcggtaggtcgcgaaggcgatgtactgctggggatctccacctccggtaactctgcaaacgtgatcaaagcgatcgcagcggcgcgtgagaagggaatgaaagtgatcaccctgaccggtaaagacggcggcaaaatggctggcacggcggatatcgaaattcgcgtaccgcactttggttatgccgaccgcattcaggagattcacattaaagtgatccatatcctgatccagttgattgaaaaagagatggttaagtaagtctggcgtaggccggataagacgtttacgccgcatccggcatttgtgcgctgatgcctgatgcgacgctgacgcgtcttatcatgcctacaaatctgtacgcgaaccgtaggccgaataatgcgttcacgccgcatccgacctgaaaattcttaaatcaatcttcgccgggggccatgcgctcccgctgttgtggaggttacccatgtgcgaattgctcgggatgagcgccaacgtccctaccgatatctgctttagtttcaccgggcttgtacagcgtggtggtggaaccgggccacataaagatggctggggcattaccttttacgaaggtaaaggctgtcgcacatttaaagatccacaacccagctttaattcccccatcgccaaacttgtccaggactacccgataaaatcctgtagcgtggtggctcatattcgccaggctaatcggggcgaggtggcgctggaaaatactcacccatttacccgcgagttatgggggcgtaactggacttatgcccataacggacaactgacgggctacaaaagtctggaaaccggcaacttccgcccggtaggcgaaaccgacagcgaaaaagccttctgctggctcctgcataaattaacgcagcgttacccgcgcacaccgggcaacatggcggcggtatttaaatatatcgccagtctggcggatgaactgcggcagaagggcgttttcaacatgctgcttagcgacgggcgctatgtaatggcgtattgcagcactaatttacactggatcacccgccgcgcgccgtttggcgtggcaacgttgctggatcaggatgtggaaatcgacttcagcagccagaccacaccgaatgatgtggtcacggtgattgcaacacagccgctgacgggcaatgaaacctggcaaaagattatgccaggcgaatggcgcttattttgcctcggggagcgtgtagtttgattattttgcctcggggagcgtgtagttacttgccagttgtggctgcacaacttcgtggcttaacggcttgctgaccacgtaacgaccattgaccacagaaacggttggtggcttacgggtttgctcaaagtagtcgtaacccggcttcagttgctcccagaagtccttaaagttggaatatttatggcgcttcatattggcgtcggtcatgcggaacgggtaaatactcacttgcacgctcggctgaccaaacaccagcgcaccagtaacgaactggaatatctcatcaataccctgattggtcattgcgtagcagccgatggaaacacaatcgccgtggatcatcaggtatttcccttcataaccatgcgcacggtcataggcattggggaaaccaatattaatcgctttgtagtaacggctgtctggttttaactgattacgctggacgctataaaacccttccgggcttttgaaatcgccctgacgctgttttggccctaagccgccggaatatttacagattttatagctgtcgagcagttgatattgctcgcccattttgacgtagagatcgagcgtacgttcttccttgaagatctggatgtagacaggggatcccatcaactgctgcttatactctttgctcacaggcgtggtagagctactgctgcccagcaaaccggcaaaactaacgcacgggatcaacaacatcgcaagaattaatgcgattttacgcatactgcttattccttgataaaacggttacacacgccaggacggcaaaatggatcccaaatcggaatagtctggatttggaaggctcacattatcaccaaaagagttttacgcaagcctgtcggcgcagggtttacaaatttcatcggaagcgggctttacccaaagagcgccgcgtgagttccagttctctcaaatcgtaaaagtttatcggtaagtttgtaaatcaggatccagtccggttcgacatgagcatcgcgataacctttccaactaccttgcagcgggtggtctttataaacagctggaagcggtaaagtattattgataagaagcgtcataagatatttcaatttattcatatccttatgacgcttttgtgcaagttttacatccttactatattgtccgctgtattcaatatccctttgaatcatatttaaattcctaatttatcaaataaatcatcggcgtctttggccttatgaacatcaatgccagcttcgctgtttttgatactttgaatggttaattgattaggctcgcgtaaatcaaacggcaatgccttttcacgcgcgacctttgtgagggttatgcgaaccaggtcagagatggtcagccccatcccggccagtacgtccgctgcctgattcttcagatcttcatcgattcgggcgcgaacaaacgcgttagcagccattggggtatctcctgtgctgtatatttattcagcttgaattgtagctcaaatgagcaacagcgacaatccatgagtaatttaataaacggatgtttttacataattaactgaaatatatatgttaattttataataatggtttattaagtttgttcagaaacgatccgggatacactgcaacattaaagcatgaccagccattattgagtatgtccttgccgagcattccatcctttgtattgagcggattactgttgatttgtttgccgttttctagttttgccagcgccaccacaagtcatatctctttcagctacgccgcccgccagcggatgcaaaaccgtgcgcgtttattaaaacagtaccaaactcatctgaaaaagcaggccagctatattgtggaaggcaatgccgaaagcaaaagggcgctacgccagcacaaccgggagcagataaaacagcatccagaatggtttcctgctccgctcaaggcgagtgacagacgctggcaggcgctggcggaaaacaaccactttttaagcagcgaccatctgcataacattaccgaagtggcgattcaccgcctggagcagcagcttggcaagccttacgtctggggcggtacgcggcctgataaaggctttgactgtagcgggttggttttttatgcctacaacaagatccttgaggctaagctcccgcgcacggccaatgagatgtaccactatcgccgggcaacgattgtggcgaacaacgacctgcgccggggagatttgctgtttttccatatccacagccgcgagatagccgatcatatgggcgtgtatttgggcgatgggcaatttatcgagagcccacgtaccggcgaaaccattcggataagccgattagccgaacctttctggcaggaccattttttgggcgcgcgcaggattttgacggaagagacgattttgtaagacggataaggcgtttacgccgcatccggcagttgtacgcaggtgcctgatgcgacgctggcgcgtcttatcatgcctacgagcccgcgaatatttgcgagccgctttcccgatataaaacaacctcattgccaacctttccttttcttcttaccgttgagaaaaaggagtcgccatgtctgaatatcgtcgttattacatcaaggggggaacatggtttttcacggtgaatttacgaaatcgtcgaagccaacttttgaccacccagtaccagatgctccgtcacgccattattaaagttaagcgagacaggccttttgaaatcaacgcctgggtcgttttgccagagcatatgcactgtatctggacattacctgaaggcgatgatgatttttccagccgctggcgggaaattaaaaagcaatttacccatgcttgtggattgaaaaatatctggcaaccacgtttttgggagcacgccatccgcaataccaaagattataggcatcatgttgattatatttatataaatccagtaaagcatggttgggtaaagcaagtgagtgattggccattcagtacgttccatcgcgatgtcgcgcgagggttatatcccatcgattgggcgggggacgtaacggattttagtgccggggagcgtatcattagttaattgtgcgcagatgcctgatgcgacgctagcgcgtcttatcatgcctacaaacttgtgccggatcggtaggccggataaggcgtttatgccgcatccggcagttatgcgcagatgcctgatgcgacgctggcgcgtcttatcatgcctacaaacttgtgcctgaacggtaggacggataaggcgttcacgccgcatccggcagttgtgcaccaatgctggatacttacatcaacgcccccataatcttcaactccagctcatccggcacttcgttatacgacagcacatgcagccccggcgcaaacaaccttgcataacgcgccagcaaagggcgcagctgcggtggcaccagcagcaccgggtctttccccgccgctttcatctgctctttcacctgtggcatcgtactctggaactggttgagcatattcggatcgaccggcacgctgtcgagcatcactttcccgccctgttgcgcctgattcaccacgttggtcagcagattttccagctcattattcagcgtatacaccgtcagctcctgcttgcgaacgaacggatgggtaatgctgcgccgcaatgccaggcgcacatcggccgccagcagaatatgatctttcgtcaccgtgctactggcgaccagcacggtggcgatggtgacgatatcgcgcagggaaacgccttcggtcagcagcgcccggtacactttcagcaactggctgtaattgagcgccgcgctcaaatcttccgccagacgcggtgccgtcgacgataaacggttatgcaactgcgtaatatcatcatagttaaacaaatcaggaatatagctgcgcacaatcttatttacatgggtagcgatcacgctggcgctgtcgatcacctgataccccatattcagcgccttcgctttctgcgccgcctggatccaggtgaccggcatcccgtacgccgggtcgttcccctgcacgccgtcaatctcgccgtaggtttcgctggagggcagggccatcagtttatccgccggaatatccgcttcatcagcctttatgccgttgatgaaaatggcgtactgactgggcttaaggcggaagttttcccgaatgcggatctccggcagcagcacgccgttgccgtcagaaatcacctgccgcacgccgcgaatccgctgggtgagcgggttaccctgtgctttgtccaccagcgccaccagtttgtaaccgaggcttaaactgataggctcgatcagcggaatggtttcccaactgacctgctgctcgctggtttcggtgatggtgcgggtcagcgtttcgaggcttttctcttccgcctccgccgccagcggctgtttgctcatccgccagccggtaaaaccaagcagggcgctgaacagcaaaaacggcaggtgcggcattcccggtaccaccgccagcacgaacataatcccggtggcggtgtagagcaccgacgggcttgccagcagctggttacgcacgtcatgggcgatatcgccgttgtcgctgacgcgggtgacgataatcgccgccgcggtggagagcagcagggaagggatctgcgccaccaggccgtcgccgatggtcatcagcacatactgctggaaggcagcatcggcgctcaggttgtatttgaagatcccgatacagacgccgccgatcaggttgatcgccagaatcatcatcccggcgatggcgtccccgcgcacaaacttcgatgccccgtccatcgcgccgtagaaatcggcctcgctggcaacatctttacgccgggtttgcgcctgcgcctggttgatcaatccggcgttaagatcggcgtcaatcgccatctgtttgccgggcatcgcgtctaaggtaaagcgggcagaaacctcggaaatacgctcggcccctttggtgacgacaataaagttgattgtcaacagcgtcagtaaatccgagcgtgaaagcattatcgccgcgctgcacgggcagtcgatttttaacggtggtgggctgtcgccgttaaataaaatcagcccgtctcatccgccaaaacctgccaccgtggcggtgccggaagagacggagaaaaaagcgcgtgatgtgaatgagaaaacggcgctgctgaagaagaaatccgccaccgagcttggtgagctggcaaccagtatcaacaccattgcccgtgatgcgcatatggaagcgaatctggagatggagattgttccccagggattacgcgtgctgattaaagacgaccagaaccgcgatatgtttgaacgcggcagcgcgaagattatgccgttctttaaaacgctgctggtggagctcgcgccagtgttcgactcgctcgataataaaattattattaccgggcataccgatgcgatggcctacaaaaacaatatctacaacaactggaacctttcgggtgaccgcgcgctttcggctcgtcgggtgctggaagaggccggaatgccggaagataaagtgatgcaggtaagcgcaatggcggaccagatgctgctggattccaaaaatccgcaaagcgcgggcaaccggcgcattgagattatggtgctgaccaaaagtgcgtccgatacgctgtatcaatactttggtcagcatggggataaagtggtgcagccgctggtgcaaaagctggataagcagcaggtgctttcgcagcgaacgcgttaaatgctgaatctttacgcatttctcaaaccctgaaatcactgtatactttaccagtgttgagaggtgagcaatgcgtaaaatcattcatgtggatatggactgctttttcgccgcagtggagatgcgcgacaatcccgccctgcgcgatatccctattgctattggcggcagccgcgaacgtcggggggtgatcagcaccgccaattatcccgcgcgtaaatttggcgtacgtagcgctatgccgacagggatggcgctcaaattatgcccacatctcaccttgcttccggggcgctttgacgcctacaaagaagccagtaatcatatccgtgaaatcttcagccgctacaccagccgcattgaaccgttgagtctggatgaggcttatctcgatgtcaccgatagcgtccattgccacggttctgcgaccctcatcgcccaggaaatccgccagacaatcttcaacgagctgcaactgacggcgtctgcgggcgtggcaccagtaaagtttctcgccaaaatcgcctccgacatgaataaacccaacggccagtttgtgattacgccggcagaagttccggcatttttacaaaccttaccgctggcaaaaatccccggcgtcggcaaagtcagtgcggcaaaactggaagcgatggggctgcggacctgcggtgatgtacaaaagtgtgatctggtgatgctgcttaaacgctttggcaaatttggccgcattttgtgggagcgtagtcaggggattgacgaacgcgatgttaacagcgaacggttgcgaaaatccgtcggcgtggaacgcacgatggcggaagatattcatcactggtctgaatgtgaagcgattatcgagcggctgtatccggaacttgaacgccgtctggcaaaggtaaaacctgatttactgattgctcgccagggggtgaaattaaagttcgacgattttcagcaaaccacccaggagcacgtctggccgcggctgaataaagctgatctaatcgccaccgcgcgtaaaacctgggatgaacgccgcggcgggcgcggtgtgcgtctggtggggctgcatgtgacgttgcttgacccgcaaatggaaagacaactggtgctgggattatgatgtatactattatgtatattctggtgtgcattattatgagggtatcactgtatgcatcgaattctcgctgaaaaaagcgtcaatatcactgagttacgtaaaaacccagctaaatactttattgatcaaccggttgcggttctttctaataatcgccccgcaggatatctcttaagtgccagcgcattcgaagcgttaatggacatgcttgctgaacaagaggagaaaaagcccataaaggcgcgcttccgtccaagtgctgcaagattagaggaaattacacgccgcgctgaacaatatcttaatgatatgacggatgatgatttcaatgactttaaggaataaggatgcgggtattcaaaacaaaacttattcgcctgcaacttacagcagaggaacttgatgcgttaacggcggattttatttcctataagcgtgacggtgttttgccagatatatttggtcgcgatgcactctacgacgactcctttacctggccattaatcaaatttgagcgagttgctcatattcatctggcaaatgagaataatccatttccgccacagttgcgccaattcagcagaacgaatgacgaagcgcatttggtatattgtcagggggcgtttgatgagcaagcatggttgctcattgccattctgaaacctgaacctcataaactggctcgagataacaaccaaatgcataaaattgggaaaatggcagaagcgtttcgcatgcgtttttgaatttatattatgaataacatacaaataagaaactatcagcctggcgattttcagcaactatgcgctattttcattagagcggttacgatgaccgccagtcagcattatagtccacaacaaatttccgcctgggcgcagattgacgaatctcgctggaaggagaaactcgcgaaaagtcaagtgtgggttgcgatcattaatgcacaaccggttggttttatttcccgcattgaacattatatcgatatgttatttgttgaccctgaatacacccgccgtggggttgccagcgctttgttaaaacctttgattaagtctgaatccgaacttacggtggacgcaagcataaccgcaaaacccttttttgaacgttatggttttcagacagttaagcagcagcgcgttgaatgccggggagcgtggtttactaatttttatatgcgatataaaccgcaacattaaatccagcttgcaatgaaaataacgcccgcctggtatgtgcgcgttttctgattccacaaactgcaaggaggtaaatcatgacaaatcctttatcaatgactctttgcagacctttccaggattaattctttttttcttgccctggattcgtctgccatttcctgatttttatatttatatactctaaataattcgagttgcaggaaggcgacaagcgagtgaatcgccaggagcttacataagtaagtgactggggtgaacgaacgcagtcgcagtacatgcaacttgaagtatgacgagtataaatggaatggtacatgggcaaatatattcgtcccttatccgatgcggtatttaccatcgcatctgatgacctgtggatcgagagtttagcgatccaacaattacacaccacggcaaatttacccaacatgcagcgcgtagtggggatgccagatttacaccccggacgcggctacccgattggcgcagcgttcttctctgttggtcgtttttacccggcaagacgtcgcggtaacggtgctggaaacagaaacgggccgctactctgacacactgcgtagcgcgctggtttctctcgatggcgataacgcatgggcattaagcgaaagctggtgtggcactattcagtggatttgtccgagtccgtatcggcctcatcatgggcgcaaaaactggtttctgggcattgggcgttttaccgctgatgagcaggaacaaagcgatgcaatccgttatgagacgctgcgtagcagcgggccgggcggtcaacatgtcaataaaaccgacagcgcggtacgcgccacgcatttggcatccggtattagcgtgaaggttcagagtgagcgtagtcagcatgctaacaagcggctggcacgattgctgattgcctggaagctggagcaacagcaacaggaaaatagcgcggcgctgaaaagccagcggcgaatgttccatcaccagattgaacgtggcaacccgcgacggacatttacagggatggcttttatcgaaggataatgaaggatgaaactgccggaaggcgattaaacgccatccggcagcaaatcaaataattacttcgccggaatttctttcagcagttcagtcagcagtgtccagtaatgacctacgctttcgatgtgaacttgctcatccggagagtgtggaccggtgatagttggcccgatagaaaccatgtccatttccggatacggttttttgaacagaccacattccaggcccgcgtggataatctggatgttcggcgtcttgttgaacaggcgctgataggtttcacgtaccagatgcatcaccggagaattagcgtccggctgccagccaggatatgcgcctttcgcttcggttttcgcgccagccagtttacccaggctatccagcatgctcaccacgtagtctttaccgctgtcgatcagactacggatcaggcagtgaatttctacgttattgtcagtcatggtcaccacaccgacgttcagggaggtttcaaccacacctttggctacatcggagttacgaatcacaccgttcggggtggcgttcagcagacgaataaaggtatcgcgagatttcgcaatcagggcagctttatcgttcgctacagagtccagcaacaaggccagatttttctctttttctgccagctcgtttttcaggatctcctgataggtattcaccagagatttcaggacgtcgactttatcagctgcgacagcaatggtcgcaaaggcttcacgcgggatggcgttacgcagtgtgccgccgttgaaatcgataaggcgcagatccagttcttccgcatgacccgccaggaagcgcaccagcagtttgttggcattacccagcccaacgtggatttccccgccggagtgaccgcctttcagaccttttaaggttaacttgaaggtttcaaaaccagctggaaccgcttcacgatctaaatgcaggttggaggtgaagtcgataccccccgcacaacccatgtagatttcaccttcttcttcggagtcggtgttaatcagaatatcagcctgcaaccagttgccctgtaagccgaacgcaccgtccataccggcttcttcggtcatggtcagcagcacttccagcgggccgtgaaccacgttttcgtcagccagaaccgccagcgcagaggccataccaatgccgttatccgcacccagcgtggtgccgcgcgctttaacccattcgccatcaatataaggctggataggatctttcgtgaagtcatgcacggtgtcgttatttttctgcggcaccatatcgaggtgggcctgtaagacgaccggtttacgattttccatacctgcggtagcaggtttacgaatcaggatattacctacctgatcgcgttcgacatggaaacctttctcttttgcccaaccaacaatgtattcagcgagttgctcttcatgataggacgggtgaggaatagaacagattttggcaaaaatatcccacagcggctgtggagataattgagacagttcagacacgttaagtctccttgtcgatcacccgcaaaacagtattgcaggtcacagggttagcagaaaatgttgtcaacacaagacaggcttgcgagatatgtttgagaataccactttatcccgcgtcagggagaggcagtgcgtaaaaagacgcggactcatgtgaaatactggtttttagtgcgccagatctctataatctcgcgcaacctattttcccctcgaacactttttaagccgtagataaacaggctgggacacttcacatgagcgaaaaatacatcgtcacctgggacatgttgcagatccatgcacgtaaactcgcaagccgactgatgccttctgaacaatggaaaggcattattgccgtaagccgtggcggtctggtaccgggtgcgttactggcgcgtgaactgggtattcgtcatgtcgataccgtttgtatttccagctacgatcacgacaaccagcgcgagcttaaagtgctgaaacgcgcagaaggcgatggcgaaggcttcatcgttattgatgacctggtggataccggtggtactgcggttgcgattcgtgaaatgtatccaaaagcgcactttgtcaccatcttcgcaaaaccggctggtcgtccgctggttgatgactatgttgttgatatcccgcaagatacctggattgaacagccgtgggatatgggcgtcgtattcgtcccgccaatctccggtcgctaatcttttcaacgcctggcactgccgggcgttgttctttttaacttcaggcgggttacaatagtttccagtaagtattctggaggctgcatccatgacacaggcaaacctgagcgaaaccctgttcaaaccccgctttaaacatcctgaaaccagcacgctagtccgccgctttaatcacggcgcacaaccgcctgtgcagagcgcccttgatggtaaaaccatccctcactggtatcgcatgattaaccgtctgatgtggatctggcgcggcattgacccacgcgaaatcctcgacgtccaggcacgtattgtgatgagcgatgccgaacgtaccgacgatgatttatacgatacggtgattggctaccgtggcggcaactggatttatgagtgggccacccaggcgatggtgtggcaacaaaaagcctgtgcggaagacgatccgcaactcagtggtcgtcactggctgcatgcggctacgttgtacaacattgccgcctatcctcatctgaaaggagatgacctggccgagcaagcgcaggctttgagtaaccgcgcctatgaagaggccgctcagcgtctaccgggcacgatgcggcagatggagtttaccgtacccggcggtgcgcccatcaccggctttttgcatatgccgaaaggcgatggcccgttcccgacggtattaatgtgtggtggtctggatgcgatgcagacggactattacagcctgtatgaacgttattttgcgccgcgcggcattgcgatgctgactattgatatgccgagcgtgggcttttctagtaaatggaagctcacccaggactccagcctgttgcatcagcacgtcttaaaggcgctgcctaacgtaccgtgggtggatcacactcgcgtcgcggcctttggtttccgtttcggcgctaacgttgccgtgcgtctggcataccttgaaagcccgcgtctgaaagcggttgcctgtcttggtccggtagttcataccctgttgagtgattttaagtgccagcaacaggtgccggaaatgtatcttgacgttctggccagtcgtttggggatgcatgatgcttccgatgaagcgttgcgcgtggagctgaatcgctatagtttaaaagtgcaaggattgctgggacgtcgctgcccaacgccaatgttaagtggctactggaagaacgatccgttcagcccggaagaggacagtcgcttaatcaccagtagttctgctgacggtaaattattagagatcccatttaacccggtgtatcggaattttgacaaaggtcttcaggaaatcaccgactggatcgaaaaacgcttgtgttaaaaatttgctaaattttgccaatctggtaaaacagttgcatcacaacaggagatagcaatgacgttaccgagtggacacccgaagagcagattgatcaaaaaatttaccgcactaggcccgtatattcgtgaaggtaagtgcaaagataatcgattctttttcgattgtctggctgtatgcgtcaacgtgaaaccggcaccggaagtgcgtgaattctggggctggtggatggagctggaagcgcaggaatcccgttttacctacagttaccagtttggtctgttcgataaagcaggcgactggaagagtgttccggtaaaagacactgaagtggttgaacgactggagcacaccctgcgtgagtttcacgagaagctgcgtgaactgctgacgacgctgaatctgaagctggaaccggcggatgattttcgtgacgagccggtgaagttaacggcgtgagtgaaatgtgccggatgcatcacatccggcaatattcattaaaactgatacgtcatgccaaccgcgacaatatcatcattattaatattcaatttgttatcgctatccagttggttgattttataatcaacaaacgcactcatatttttgttgaaataatacgtagcaccgacgtcgatataattgaccagatcttcatcaccgataccttcaatatctttccctttgcttaagacataacccaggcttggacgcagaccaaagtcaaactggtattgagcgaccgcttcaaagttctgtgtcttattggcaaagccgccagttattggcgtcattttgcgtgtttcagaatagaaagttgccagataaatattattggcatcgtatttcagacctgttgcccatgcttctgcacgcttgcctgtgccacggctttgcaggttctgctcgttggtgcgatcactgttggtataggccccactaatggcgaaatcgctgccgccaaagtcatatgtcaaactcgtgccgaagccatcgccgttttgctttttaacgtcgcggttttcgtttttcccttgatattgcagggttaagttcaggccatcgataacgccgaagaagtcggtgttccgatacgtcgccagaccgctggcgcgtttggtcataaagttgtcggtctgcgcgctggaatcgccaccaaattccgggaacatatcggtccaggcttccacgtcatacaacgcccccaggttacgaccataatcgaaagaacccaaatctttatatttcaacccggcaaaagcgagacgcgttttttgctgtgcagtatcactctctgctttattaccggcaaactctgcttcccaacgaccataaccagtcagttgatcgttaatttgtgtttcgcctttgaaaccaaaacggatataactctggtcgccatctttactggcgttatcactcatataatgcatggctttaactttgccatagacatccagtttattaccgtctttattatatatttctgcagcctgtacagatgcagatgccacaatgcccatcaccactaatgccagagtgctctttttcattttcattcctgattttaattaacgcgcgaatattcagcgggagagtcccgttgaaaacaggaaagtttttaacctgagattgttaaagatatattacagattaataatattcttaaaatgtggtaatttattaaatctgtaataaaagcgtaaacaactgccgctaggcttgctgatcccgcgcaacaaaacgccatgctttgctcgcagatggttggcaaccgacgacagtcctgctaaaacgttcgtttgatatcatttttcctaaaattgaatggcagagaatcatgagtgacagccagacgctggtggtaaaactcggcaccagtgtgctaacaggcggaagccgccgtctgaaccgtgcccatatcgttgaacttgttcgccagtgcgcgcagttacatgccgccgggcatcggattgttattgtgacgagcggcgcgatcgccgccggacgtgagcacctgggttacccggaactgccagcgaccatcgccagcaaacaactgctggcggcggtagggcagagtcgactgattcaactgtgggaacagctgtttagcatttatggcattcacgtcgggcaaatgctgctgacccgtgctgatatggaagaccgtgaacgcttcctgaacgcccgcgacaccctgcgagcgttgctcgataacaatatcgttccggtaatcaatgagaacgatgctgtcgctacggcagagattaaggtcggcgataacgataacctttctgcgctggcggcgattcttgcgggtgccgataaactgttgctgctgaccgatcaaaaaggtttgtataccgctgacccgcgcagcaatccgcaggcagaactgattaaagatgtttacggcattgatgacgcactgcgcgcgattgccggtgacagcgttagtggcctcggaactggcggcatgagtaccaaattgcaggccgctgacgtggcttgccgtgcgggtatcgacaccattattgccgcgggcagcaagccgggcgttattggtgatgtgatggaaggcatttccgtcggtacgctgttccatgcccaggcgactccgcttgaaaaccgtaaacgctggattttcggtgcgccgccggcgggtgaaatcacggtagatgaaggggcaactgccgccattctggaacgcggcagctccctgttgccgaaaggcattaaaagcgtgactggcaatttcagccgtggtgaagtcatccgcatttgcaacctcgaaggccgcgatatcgcccacggcgtcagtcgttacaacagcgatgcattacgccgtattgccggacaccacagccaagaaattgatgcaatactgggatatgaatacggcccggttgccgttcaccgtgatgacatgattacccgttaaggagcaggctgatgctggaacaaatgggcattgccgcgaagcaagccagctataaattagcgcaactctccagccgcgaaaaaaatcgcgtgctggaaaaaatcgccgatgaactggaagcacaaagcgaaatcatcctcaacgctaacgcccaggatgttgctgacgcgcgagccaatggccttagcgaagcgatgcttgaccgtctggcactgacgcccgcacggctgaaaggcattgccgacgatgtacgtcaggtgtgcaacctcgccgatccggtggggcaggtaatcgatggcggcgtactggacagcggcctgcgtcttgagcgtcgtcgcgtaccgctgggggttattggcgtgatttatgaagcgcgcccgaacgtgacggttgatgtcgctagcctgtgcctgaaaaccggtaatgcggtgatcctgcgcggtggcaaagaaacgtgtcgcactaacgctgcaacggtggcggtgattcaggacgccctgaaatcctgcggcttaccggcgggtgccgtgcaggcgattgataatcctgaccgtgcgctggtcagtgaaatgctgcgtatggataaatacatcgacatgctgatcccgcgtggtggcgctggtttgcataaactgtgccgtgaacagagcacaatcccggtgatcacaggtggtataggcgtatgccatatttacgttgatgaaagtgtagagatcgctgaagcattaaaagtgatcgtcaacgcgaaaactcagcgtccgagcacatgtaatacggttgaaacgttgctggtgaataaaaacatcgccgatagcttcctgcccgcattaagcaaacaaatggcggaaagcggcgtgacattacacgcagatgcagctgcactggcgcagttgcaggcaggccctgcgaaggtggttgctgttaaagccgaagagtatgacgatgagtttctgagtttagatttgaacgtcaaaatcgtcagcgatcttgacgatgccatcgcccatattcgtgaacacggcacacaacactccgatgcgatcctgacccgcgatatgcgcaacgcccagcgttttgttaacgaagtggatagctccgctgtttacgttaacgcctctacgcgttttaccgacggcggccagtttggtctgggtgcggaagtggcggtaagcacacaaaaactccacgcgcgtggcccaatggggctggaagcactgaccacttacaagtggatcggcattggtgattacaccattcgtgcgtaaataaaaccgggtgatgcaaaagtagccatttgattcacaaggccattgacgcatcgcccggttagttttaaccttgtccaccgtgattcacgttcgtgaacatgtcctttcagggccgatatagctcagttggtagagcagcgcattcgtaatgcgaaggtcgtaggttcgactcctattatcggcaccattaaaatcaaattgttacgtaagatcttatcattctcccaccaaaaaattatcttaatgtaacagctggtgtaagtaaattctatcaacgaagatcaatcttatctactgaccaaaaaggcctgatagggcttcgctcactatacatccttggctgcaggtttagttgtacaccactcctaaatttaatgtgttggcaatgtgttcaataaagctcgaacaaattagctcattatgatcggttaatacttcaacttctggttgcatgattgtttgtccgtaaaaagataacgcgcctgccgggtagtagcaggcgcattacgcaataggtaaacaagggaggaagttcagaaatgtaaatcgggaaggttgtacgcaatgttcatcgtactacgttgttacggctttgccgcaacaagccagttgcctgccgcgctcgcagaatgtctgcagcccggagataaggagattgttcctgccagctaaatcccttcctgtcgatacgaaccagctcgtatttttctaccagaaaattcacggcatcggctagggtgataccggcatcgatagtctgtatcaggaatgttcgggttaaatatcagcaaaaagcccgcatcatgaatactggatatgaagcatgagagttacctcagtgtttatataaggattcggtccccctctctggaacggtaactctcaatctgatcggttcctgcgttagttcacatcacgactcattttttcgctctcaccggcatcccatttgccacaaaatatcccgccgtgctcctcggcagcgcttcctgtccacgaatcatatccgctattttctcgccaatcataattgtcgtggcgttcaaattcccggtgataatctgcggcataatgctcgcatccaccacacgcaggccttctaacccgtgtacgcggccttcgccgtcaaccacggacatctcgtcgtaacccattttgcaggtaccgcacggatggaaggcggtttcggcgtggttacgcacgaactcatcgagctgttcatccgtctggcattcgacaccggggctgatttcgcggccacgatactgatccagcgcgggttgatgcatgatctcgcgggtgatgcgaattgcgtcgcggaactcctgccagtcctgctcgtggctcatgtagttaaacagaatcgccggatgctggtgcgggtcgcgggatttaatccgcacatgcccacggcttgggctgcgcatactgccgacgtggcactggaaaccgtgctctttcactgcattgctgccgttatagttaatcgctactggcaggaaatggtactgaatattcggccacgcaaattcctcacggctgcgaataaatccacctgcttcaaagtggttgctggcaccaacgccagtgccgccaaacagccactccgcaccgattttcggctggttccaccactgcagggcagggtagagggaaaccggttctttgcactcatattgcagatacatctccagatgatcctgaagattttcgccgacgccgggtaattcatgcaccagcggaatatcaaactccgccagcagttcagcgttgccgacgccggagcgttgcaggatctgcggactggcaatcgcgcctgcacataacagcacttctttgttggccgttgcgcgggttgggatggtgctgtcgccttccagccattcgacgcccaccgcgcgtttgccgtcaaaaatgatgtgatcggtcatagcgtgagtacgaatggtcaggttaggacggcttttggcctgatcgagatagccacgcgcggtgctggcgcgacggccctgcggcgtgacggtgcgatccatcggaccaaaaccttcctgctgataaccgttgagatcgtccgtgcgcgggtagcccgcctgcacgcccgcttcaatcatcgcttcaaacagcggattgacgccgggtttggaggtagtgacgctcaccgggccatcaccgccgtgatagtcgttttcacccatatcgcgagtctcggccttgcggtagtagggcaggcagtcgaggtagctccagttctccagaccgggttcttgcgcccagttatcgagatccagcgcattgccacggatgtagcacatgccgttgatcaggctgcttccacccagacctttaccgcgtccgcactccatgcggcggttattcataaacggttcaggttccgtttcataggcccagttgtagcgtttaccctgtagcgggaatgccagggcagcgggcatctgggtgcggaagtcaaagcgatagtccgggccgcccgcttcaagcagcagcacggaggtattcggatcttcagtcagacgggtagcgagaacgttgccggcactgccggcaccaataatgatgtagtcaaattgcaaataaacctcctggttagaatatggactggaatttagccatctcaacctggatggacttcacctgggtgtaactctggagcgtcatcacgccgttctcgcgaccaatgccggagtgtttgtagccgccaacgggcatctctgccggggattcgccccaggtgttgatccagcaaatacccgcttccagctgatgaatgacgcgatgcgcgcggttcaggtccgctgtcacgatgcccgccgccaggccgtagtcggtatcgttagcgcggcgaatgacttcgtcttcgctctcgtaggtcagaatggacatcactggcccgaagatctcttcacgcacgatggtcatatcgtcgctgcaatcggtgaacactgtcggtgcaacccatgcgccgttatcgaagccatcgcctttcagtacatcgccgccgcacagtacgcgcgcgccttcctctttgcctttggcgatatagcgcagcacgttatcgcgatgcgggaagctgaccagcgggccgaagttagtttgcggatcgaaaacgtcgcccgcgcgaatgcgctcaacgcgcgccagaattttctgctcaaatgcggctttgcatttcgccggaacgaagacgcgggtgccattggtacacacctgaccggagctgaagaagtttgccatcatggcgatatcggcggcgagatcgagatccgcatcatcgaaaacgatcagcggacttttaccgcccagttccatggtcacttctttcagggaagaggccgcgctgttagccatcacttttttgccgctggcgacaccgccggtaaaactcactttggcaatgcccggatgctcggtcagatattgcccggtctccgcgcccacgcccggcaacacgttaaatacgccgtccggcaggcccgcttcgctgtaaatttcagccagctttaacgcggtaagcggggtaacttcgctcggtttgaaaatcattgcgttgcctgccgccagcgccggggcggatttccacagggcaatctggatcgggtagttccatgcgccaatccctgccactacgcccagcggttcgcggcgggtatacacaaaggacgtttcacgcaacgggatctggctgccttccagcgccgggatcagcccggcgtagtactccagcacgtccgcaccggtaacgatatcgacggtactggtttcgctatatgcttttccggtgtcgagggtttccagttttgcgagttcgtcattgcgttcacgcagaatatcaacggcccgacgcagaatacggctgcgctccatggcggtcatgctcgcccagattttttgcccctgctgggcgcttttcacggcgcgatcgacatcctcgcgcccggcggcctgcacggtcgccagcacgttaccgttggccgggttaatggtctcgaaggtgcgaccgctggtggcggaggtataaccaccatgtatataaagctgctgttctgccattcgggacatcacgtctcctcggttaatcggtgggtagatgctgagtgataaagtggcgggtcagggaattagcgcgggttttatccagcggtttgccgctcagagccgcgcgcagccataatccatcaatcagcgcggccaggccgtagcccgcttcctgtgcctgttcgcgcggcaattcgcgacgaaactcgctcaccagattgctcagcaagcggcggctgctgacctgctgtaaacgatagagcatcggctgatgcatactgctggcccagaacgccagccaggctttcatcgccgcactgctcacctgcgtttcatcgaagtttccgccaacaatcgcctgtaatcgctgctctgcactgccctgcggaagtgcatgtaatcgattcaaaaccgcgtcacgcagctgactggtgatatcgcgcatggttgcttccagcagaccatttttgtccctgaaatagtggctgatgatccccgtagaaacgcctgcacggcgggcgatctgcgcgatcgttgcatcgtgcatgcccacttcatttattgcttccagtgtggcgtcgatcagttgtctgcgccggatgctctgcatccccaatttgggcattttcgccactccattcatcagcggtgtttatctattaaagcggttattgattggacgttcaatataaaatgtgtcttaattgttacgaatttgattttaaatagtaacaataacagtggggatactggatgacagaccttagtcacagcagggaaaaggacaaaatcaatccggtggtgttttacacctccgccggactgattttgttgttttccctgacaacgatcctgtttcgcgacttcagcgccctgtggattggccgcacgctggactgggtttctaaaaccttcggttggtactatctgctggcggcaacgctctatattgtctttgtggtctgtatcgcttgtagccgttttggtagcgtgaagctcgggccagaacaatccaaaccggaattcagcctgctgagttgggcggcgatgctgtttgctgccgggatcggtatcgacctgatgttcttctccgtagccgaaccggtaacgcagtatatgcagccgccggaaggcgcgggacagacgattgaggccgcgcgtcaggcgatggtctggacgctgtttcactacggcttaaccggctggagcatgtatgcgctgatgggcatggcgctcggatactttagctatcgttataatttgccgctcaccatccgcagcgcgctgtacccgatcttcggtaaacggattaacgggccgataggtcacagtgtggatattgcagcggtgatcggcactatcttcggtattgccactacgctcggtatcggtgtggtgcagcttaactatggcttgagcgtactgtttgatattcccgatagcatggcggcgaaagcggcactgatcgccttgagcgtgataatcgccacgatctctgtcacctccggtgtcgataagggcattcgcgtgttaagcgagcttaatgtcgcgctggcgctgggattgatcctgttcgtattgtttatgggcgacactagcttcctgcttaatgcactggtgctgaatgttggcgactatgtgaatcgctttatgggcatgacgctcaacagttttgccttcgaccgtccggttgagtggatgaataactggacgctcttcttctgggcatggtgggtggcatggagcccgtttgtcggcttgttcctggcgcgtatcagccgtgggcgtaccattcgccagttcgtgctgggcacgttgattattccgtttaccttcacgctgttatggctcagcgtgttcggcaatagcgcgctgtatgaaatcatccacggcggcgcggcatttgccgaggaagcgatggtccatccggagcgcggcttctacagcctgctggcgcagtatccggcgtttacctttagcgcctccgtcgccaccattactggcctgctgttttatgtgaccagcgcggactccggggcgctggtgctggggaatttcaccagccagcttaaagatatcaacagcgacgcccccggctggctgcgcgtcttctggagcgtggcgattggcctgctgacgctcggcatgctgatgactaacgggatatccgcgctgcaaaacaccacggtgattatggggctgccgttcagctttgtgatcttcttcgtgatggcggggttgtataaatctctgaaggtagaagattaccgccgtgaaagtgccaaccgcgataccgcaccgcgaccgctggggcttcaggatcgcctgagctggaaaaaacgtctcagccgcctgatgaattatccgggcacgcgttacactaaacagatgatggagacggtctgttacccggcaatggaagaagtggcgcaggagttgcggttgcgcggcgcgtacgtggagctaaaaagcctgccaccggaagagggacagcagttgggtcatctggatttgttggtgcatatgggcgaagagcaaaactttgtctatcagatttggccgcagcaatatagcgtgccgggctttacctaccgcgcacgcagcggtaaaagcacctactaccggctggaaaccttcctgttagaaggcagccagggcaacgacctgatggactacagcaaagagcaggtgatcaccgatattcttgaccagtacgagcggcaccttaactttattcatctccatcgtgaagcgccgggccatagcgtgatgttcccggacgcgtgattgttattgcataaaaccgcgccatgtctgcatatggcgctgtttctcctacctcttgatacgttatatctatacggttaagcccttagtatctattgatgattaccagacaacagataataaaaaagaaaagaactattgcagcccaaaacctacatttgggctgttgcgaatgttcaataagtttagtcttatttaatgtaaatattgctgatcatttgaaatgacgcattattcatgagaaatgtgtatcgtaaatcaactgaaattaacgcaaccatttgttatttaaggtttaattatctgtgtgtgatattttattgaatgttttaaatattgtttttattggcattgctataatattggttatcatttgctgaatggattcagtcttaatgagtgggtttttaagggacaggcatagagtaatgatacgtatgcataaccaacatctttactcattatgtcattgaatgttgacgctatgtgtttatgagggagaggtattttcagttgatctggattgttaaattcatataatgcgcctttgctcatgaatggatgccagtatgtagtgggaaattataaatattgaaatagtccaactacttctttattaccaaaaatgagtatctgaattttaatattgcattcttgcgtgattatctcctgagtttgacttgtgattacctttttaaggtatttagcgtaactgtttttgagcgagcatcagaggtaaagataatcttcttgatagtgatgtgggatgttatacgtatggcatcgctgatgtttatggttaccccttatgtgtgctcaggaatcgacaggtaatcactcatactgaacagcgataaaagataaaggtgtgttcatgaatagttgtgattttcgtgtttttctgcaagagttcggtacaacggttcatttgagtttgcctggtagcgtatccgagaaagaacgactgctactcaagctgctgatgcagggaatgtctgtaacagaaataagtcagtacagaaatcgcagtgcaaagacaattagtcatcaaaagaaacagctctttgagaaactggggattcagagcgatattactttctggcgcgatattttctttcagtacaatccggagatcatatccgccacggggagtaatagtcacagatatattaatgataatcactatcaccatatcgtcacgcctgaagccatcagtctggcgttggaaaaccacgaattcaaaccgtggatccaaccggttttctgcgcgcagactggcgtactgacgggctgtgaggtgcttgtccgctgggaacatccacaaacgggaattatcccaccggatcagtttattcctctggcggagagttccggtcttattgtcataatgacccgccaactgatgaaacagactgcggatattctgatgccggtaaaacatttgctgccggacaatttccatattggcatcaacgtcagcgcgggttgttttttggcagcgggatttgaaaaagagtgtctgaacctggttaataaattaggtaacgataaaatcaagctggttctcgagctaacggaacgtaaccctattccggtaacgccagaagccagagcgatatttgacagccttcatcagcacaacattacctttgcgctggatgactttggtacgggttatgcgacctatcgttacttgcaggcgttcccggtcgattttattaagatcgataagagttttgtgcaaatggcgagtgtcgacgaaatctccggtcatattgtggacaatattgtcgaactagcgcgtaagcctggtctgagtatcgtggcggaaggggtagaaacccaggagcaggcggatttaatgatcggtaaaggcgttcactttttgcagggctatttgtactctccgccagtaccgggtaataaatttatctctgaatgggtaatgaaagcaggtggttgatgtaaaccgctattcacagcgcatcgggaggttggcagcgattaattctcccgatgcagtaaatcctgatagatccccgttaatatgccatttggcgcaaattgttttttaatccactgcgtcacctgacccgtagcagaatgctgagtcgccagtaacatgcggctatcctggcgcggattatggatttgtcgggtaaccagcagggattgcgtcatcgcctcacggaccatgtaatccggcaaaaaaccaattccttcacctaaaatctggcactgacatttggtgttgaaatctggcaccagaatactctcctgcccgtgcagcaaccagcccacttttttattaatcgtatgcgcggtgtcctccaccataatattagggtagagacgcagttggctttcggcgatgggttccggcacaaaggctaacgggtgatccggggcgatagcaaaagcccagcgaatcgcgccaatttcagtgtaatcaataccgccgccgtccagtagtgtatcgggtgcgccgatggcgatattggcctgattattaataatcgcatcccagacgccgttatacacttcggtggtgacggtaatctggcaggtaggaaactgctttttcagcacctgtaacaagcgtgcggtgtgtttgggcgtataaagcagctgattaatacaaatgcgcacacgcgcttctatgccctggctaatagtatcgattctgcgtttgatggcataaaaatcattcagcaggtcggtagctttgcggaaaaaataacgcccggactccgttaactcaatgctgcgggtactgcgagtgaacagcaccacatccagccccgtctccatacgcttaatggtgtagctaatggcggaagtggttaaacccaactcttctgcggctttactgaagctgccaaaacgcgcagcggtagtaaatgccaacagattctcttcggtaaaaatactgttcattaaaccattctcgccattatctactatgaatttctccagctatgactgtagaggtatcggttaaagatagataatcatttttgaataacttttaatacccgtcgcgtttagtcgtcgcttcgcttaatttttgtccaccatattcactaattacccccacgcagttacccgccagaaaacccagtaacgtcaccgtccagttcatcccgctggcaaaaaacagcgtcatgccgagaaagccaccgggaataaaggacagtaaccagaaacgcccttgccagaccactaccgcgctgaagggtacggtagtaattacgctcgcccagaacgcggacagtccacttacagaggccagccaaccagcagtcagcgcggcgaaaaacgcccacaccatcccggaataattaaccgccagacttctgataaacccgcttttaccgccgcctgcggcataaaaactgcaaaaggcgacgaagccaatggttcctaataattcccatccttgagagagcccgacatgactagacactaactgccaaagccctgcacaaataccgacggtgacacccgttgccgtgagtccgttcatcttgttcccctctggttagacatggacgaaagctactcttacatgtgcagactatagagaaataaaacctgattgagtgaaagggtatcgggtcaaagaaacaaatattgcactaccgcacactgcgaaaagattgttgaatattattcaacaaaaaggcgagatacggcgaattaaatttaagcgggttcttttatcagattatcgttgctattctcaattcatcgaaaacagccacaaaaaccaggggaatgtgaatgagtataaaaaatctacctgccgactatttattggctgcacaacagggtgatatcgataaagtaaaaacctgccttgcgctgggtgtcgatattaatacctgcgatcgtcaggggaaaacggcaattacgctggcaagtttatatcagcaatatgcttgcgttcaggcattaattgatgccggagcggatattaataagcaagattatacctgtttaaatccttttttaattagctgtctgaacgatgatttaacgctactacgaattattttaccggctaaacccgatcttaattgcgtaacccgttttggcggtgtcggcctgacgcctgcctgtgaaaaaggccatttaagtattgtaaaagagcttttggcgcatacggagattaacgttaaccagaccaaccatgtaggctggacgccgctactggaagcgattgtgcttaatgatggtggtattaaacagcaggcgattgtgcagttattgctggaacacggtgccagcccgcatctgaccgataaatatggcaaaacgccactggaactggcgcgggaacggggctttgaagagattgcgcagttactgattgccgcaggtgcataaaccgggaggcttgctatcaacacaccagaaagacggtgtgtgtgggcgctaactgcggatgcggattttctggcgcagcgggggcaaggacaggttgaacaggtctttgccagagcggtaaatatcgcactcccggctcgccagcagttgctgacgctgctttgtgaagagtacgacaatgcgccaaacagttgtcggttggcactcactcactttgatgatctgttccggcatggtgataaggttcagtttgacgatcaaggtattacggttggtcaacatcttcatatagagatgagtcgttgtcggcgttggctgtccccaaccttgcaaatgaccgctgtgaattttcaccttatcgcctggctacagtggcacgacattattcatcagcacctgggggaaaatgaaaccctgtttaattatcgcggcgataatccgttttatcaggcgttaaataaagaattacatattaaacgacgggcagttattcaggccgtaaacgataaacaaaatatcgccagtgcggtcgccagtatgatggggttagggattggccttacgccaagtgccgacgattatttaacaggtctggcgcttattttatttattcccgggcatccggcggaaaaatacaaagaggaattttatctcggtctgcaacgcggcaaaaataataccacattattaagtgccataacgctggaagccgcattacaacaacgctgccgggaaaatattcatcgttttattcacaacattatttatgacatccctgggaacgcaactcaggcaatagaaaaaattaaacatattggctccagttccggctgcgacatgctgtatggcatggccgatggttgtgcgctgagccaaacctacggagggaattatgtcagttaattaaccaaacctacggagggaattatgagtgttaaaatagtcattaaaccgaatacctattttgattctgtcagcctgatgtctatctccacgcgtgcaaataaactcgacggcgtcgagcaggcatttgtggcgatggcgaccgaaatgaataaaggcgtgctgaagaatttaggactgctgacgccggagctggagcaggcgaaaaacggcgacctgatgattgtcatcaatggtaaaagcggtgcggacaacgagcagttactggtggagattgaagaactgttcaacaccaaagcgcaaagcggcagccacgaggcgcgttacgccactattggcagcgccaaaaagcatatcccggaaagtaacctggcggtgattagcgtcaacggtctgtttgccgctcgcgaagcgcgtcaggcgctgcaaaacgatctcaacgtgatgctgttttccgataacgtcagtgttgaagatgaactggcgctcaagcaactggcccacgaaaaagggctgctgatgatggggccagactgtggcacggcgattatcaacggcgcggcgctctgttttggtaacgccgtgcgtcgcggcaacatcggtattgttggcgcatccggcaccggcagtcaggagttgagcgtccgcattcatgaatttggcggcggcgttagccaactgattggcaccggcgggcgcgacctgagcgagaaaatcggcggcctgatgatgctcgacgccatcgggatgctggaaaacgatccgcaaactgaaatcattgcgcttatctccaaaccgcctgcgcctgcggtggcccgcaaagtgctggaacgtgcgcgcgcctgccgcaagccggtggtcgtctgcttcctcgatcgtggcgaaacgccagtggatgagcaggggctacagtttgcccgcggcaccaaagaggcagcgctaaaagcggtgatgctctccggcgtgaaacaggaaaatctcgacctgcatacgcttaaccagccgttgattgcggatgtgcgtgcgcgtctgcaaccgcagcagaaatacattcgtggcctgttctgcggcggcacgctgtgcgacgaaaccatgttcgcggtgatggaaaaacatggcgatgtctacagcaacattcagcccgatccggaattccgcctgaaagatatcaaccgcagcatcaaacacaccttcctcgactttggcgatgacgacttcaccaatggcaagccgcacccgatgattgaccccaccaaccgcatcagtcgcttgatcgaagaggcgcgcgatccagaagtggcggtgatcgtgatggattttgtgctcggatttggaagccatgaagatccggtcggctccaccatcgagacgatcaaagaagcgaaagcgatcgccgctgccgaaggacgcgagttgatcattctcgcctatgtgctgggtaccgatcttgatacgccaagcttagaacaacaaagccagatgctgcttgatgccggagtgattctggcgagcagcagcaccaataccggattgctggcgcgtgaatttatctgcaaaggggaggaagcctgatgagccagagtctgtttagccaaccattgaacgttattaacgtcggcatcgccatgtttagcgatgacctgaaaaagcagcatgtagaagtgactcaactcgactggacgccgccggggcagggcaatatgcaggtggtgcaggcgctggataacattgccgatagcccgctggcggacaaaatcgccgccgctaaccagcaggcgctggagcgtattatccagagccatccggtgctgattggttttgatcaggcgattaacgtggtgccgggcatgacggcgaaaaccattcttcacgccgggccgccgatcacctgggaaaaaatgtgcggcgcgatgaaaggcgcggtcaccggagcgctggtgttcgaaggactggcgaaagatctcgacgaggcggctgaactggcggcttccggggagatcaccttcagcccgtgtcacgagcacgactgcgtgggaagcatggcgggtgttaccagcgccagcatgtttatgcacatcgtaaaaaacaaaacctacggcaacatcgcttataccaacatgagcgagcagatggcgaagattttgcgtatgggcgctaacgaccagagcgtgattgaccgcctgaactggatgcgtgatgtgcagggaccaatactgcgcgacgcgatgaaaattatcggcgaaatcgatctgcgcttaatgctggcgcaggcgctgcatatgggcgatgagtgccataaccgcaataacgccgggacgacactgctgattcaggcgctgacgccggggattattcaggcgggttattccgtcgagcaacagcgcgaagtgtttgagtttgtcgccagcagcgactacttctccggcccgacgtggatggcgatgtgtaaagcggcgatggatgcggcgcatggcatcgaatacagcaccgtggtcaccaccatggcgcgtaacggcgtcgagttcggcctgcgggtcagcggcctgccggggcaatggtttaccggcccggcgcagcaggtgatcggcccgatgtttgccggttataagccggaagatagcgggctggatatcggcgacagcgccatcaccgaaacctacggtattggcggatttgctatggcgaccgcgcccgctatcgtcgcgctggtgggcggcacggtggaagaagctattgatttctcccgtcagatgcgcgaaatcaccctcggtgaaaaccccaacgtcaccattccgctgctcggttttatgggcgtgccgagcgcaatcgacatcacccgcgtgggtagcagcggcattctgccggtgatcaacaccgccatcgcccataaagatgcgggcgtcggcatgattggcgcgggcattgtgcatccaccttttgcctgcttcgagaaagccattcttggctggtgcgaacgttacggcgtctgacctacatgttcatgccggatgcggcgtgaacgccttatccggcctacgaatggcgcaagaatctgtaggcctgataagcgtagcgcatcaggcatttgtcaccattgccggatgcggcgtgaacgccttatccggcctacgaatggcgcaagaatctgtaggcctgataagcgtagcgcatcaggcatttgccaccactgccggatgcggcgtggacgccttatccggcctacgagtggcgcgagaatctgtaggcctgataagcgtagcgcatcaggcatttgtcaccattgccggatgcggcgtgaacgccttatccggcctacgagtggcgcgagaattgtaagcctgataagcgtagcgcatcaggcagtctggcgttggtcataaccccatcaccctctgtagcggacataacaacatgaaagagcttgtggtcgttgccattggtggcaacagcattatcaaagataacgccagccagagcattgagcatcaggcggaggcggtgaaagccgtcgccgatacggtgctggaaatgctggcttccgattacgacattgtgctgacccacggcaacgggccgcaggtcgggctggatttacgccgtgcggagattgcccacaagcgcgaagggctgcccttaacgccgctggcgaactgtgtggcagatacgcagggcggcatcggctatctgatccaacaggcgctgaataaccggctggcgcgtcacggcgagaagaaagccgtcaccgtggtgactcaggtggaagtggataaaaacgatccaggttttgcccatcccaccaagcccatcggcgcattctttagtgacagccagcgtgacgaattacaaaaggcaaaccctgactggtgttttgttgaagatgccgggcggggctatcgccgcgtggtcgccagcccggaaccgaaacgtattgtcgaagcacctgccattaaagcgctgatccaacaaggttttgtcgtaattggcgcgggcggcggtggaattccggtagtgcgtactgacgcgggagattaccaaagcgtggacgcggttatcgacaaagatctctctaccgcgctgctggcccgtgaaattcacgccgacattcttgtgatcaccactggcgtcgaaaaagtgtgtattcactttggcaaaccgcagcagcaggcgctcgatcgggtggatattgccaccatgacccgctatatgcaggaagggcatttcccgcccggcagcatgttgccaaaaatcatcgccagcctgacatttttagaacaaggcggcaaagaagtgattatcaccacgccggaatgcctgcctgcggcgctgcgcggcgaaacgggcactcatattattaaaacgtaaggacgtaagatgaaagaaagcaatagccgccgtgaatttctgagccagagcggtaagatggtcaccgccgccgcgctgtttggtacctctgtgccgctcgcccatgcggcggtagctggcaccctaaactgcgaagcgaacaacaccatgaaaatcactgacccgcattactatctcgataacgtgctgctggaaaccggttttgactacgaaaatggcgtggcggtgcagacccgcacggcgcgccagaccgtggagattcaggacggcaaaattgtcgccctgcgcgagaacaagctgcatccggacgccacgctgccgcactatgacgctggcggtaagctgatgctgcccaccacccgcgacatgcatattcatctcgacaaaaccttttacggcgggccgtggcgcagcctcaatcgtccggcaggcaccaccatccaggacatgatcaaactcgagcagaaaatgctgccggaactgcaaccgtacactcaggagcgggcagaaaaactgattgatttattgcagagcaaaggcaccaccattgcccgcagccactgcaatatcgaaccggtttccggcctgaaaaatctgcaaaatttgcaggcggtgctggcgcgacgtcaggcgggctttgagtgtgaaatcgtcgccttcccgcagcacggtttgctgctgagcaaatctgaacctttaatgcgtgaagcgatgcaggcgggggcgcattacgtcggcggcctggacccgaccagtgttgatggcgcgatggaaaaatccctcgacaccatgttccagattgcgctggactacgacaaaggcgtcgatattcacctgcacgaaaccactccggcaggcgtggcagccatcaattatatggttgaaacggtagagaaaacgccacagctgaagggcaagctgaccatcagtcacgcctttgcgctggcaacgctcaacgagcaacaggtagatgaactggcgaaccggatggtggtgcaacaaatttctatcgccagcacggtgccgattggcacgctgcatatgccgctcaaacagttgcacgacaaaggcgtaaaagtgatgactggcactgacagcgttatcgaccactggagcccttatggtctgggcgacatgctggaaaaagccaatctgtacgcgcagctctatattcgtcctaacgaacagaacctctcccgcagcctgtttttagccactggcgatgtattgccgctgaatgaaaaaggcgagcgtgtatggccaaaagcgcaggatgacgccagctttgtgctggtggacgcctcctgttccgccgaggcggtggcgcgtatcagcccgagaaccgcaacgttccataaagggcaactggtgtgggggagtgtggcaggttgatgcgcatttgaaacgcctgcaacggtgaatagtaagagatttaagccccagggagtggggcaatctgaatatgagtgtgtcggcagaaatggacattatctttgaggaatatgcccttattgacgttgtgtagataactatttgtctacgtgaaaagatcatcagttttgccgattttagtcttttacagatagcaaatatcacacttacaggcgctcgccttatggggaacgttgctgctctgtttcattcaggctcgcggcatgttggggctggatcgggtggtttaaatattggctatattcaatggacgcgttttgccgcgatgacatatcaggcgttgccaaatacacatagctaatcaggagtaaacacaatgaagatcaaagctgttggtgcatattccgctaaacaaccacttgaaccgatggatatcacccggcgtgaaccgggaccgaatgatgtcaaaatcgaaatcgcttactgtggcgtttgccattccgatctccaccaggtccgttccgagtgggcggggacggtttacccctgcgtgccgggtcatgaaattgtggggcgtgtggtagccgttggtgatcaggtagaaaaatatgcgccgggcgatctggtcggtgtcggctgcattgtcgacagttgtaaacattgcgaagagtgtgaagacgggttggaaaactactgtgatcacatgaccggcacctataacagcccgacgccggacgaaccgggccatactctgggcggctacagtcaacagatcgtcgttcatgagcgatatgttctgcgtattcgtcacccgcaagagcagctggcggcggtggctcctttgttgtgtgcagggatcaccacgtatagcccgctacgtcactggcaggccgggccgggtaaaaaagtgggcgtggtcggcatcggcggtctgggacatatggggattaagctggcccacgcgatgggggcacatgtggtggcatttaccacttctgaggcaaaacgcgaagcggcaaaagccctgggggccgatgaagttgttaacagtcgcaatgccgatgagatggcggctcatctgaagagtttcgatttcattttgaatacagtagctgcgccacataatctcgacgattttaccaccttgctgaagcgtgatggcaccatgacgctggttggtgcgcctgcgacaccgcataaaagcccggaagttttcaacctgatcatgaaacgccgtgcgatagccggttctatgattggcggcattccagaaactcaggagatgctcgatttttgcgccgaacatggcatcgtggctgatatagagatgattcgggccgatcaaattaatgaagcctatgagcgaatgctgcgcggtgatgtgaaatatcgttttgttatcgataatcgcacactaacagactgaaaaaattaataaataccctgtggtttaacatattaacttcgctctccacttaactttttagttaaggagagcgaaataatatcaaagtagcagtaaaacctataacgtaaatttaaattgttaaattaacgccctccagtacacaatacttcacacgttagttatgagcgatttctgatagtgcctggtttaatcagagctttattatctgcgacgtttatttttatttaagagagatcgcgatgataagtttaaaagctccgcacaataatttgatgccatatacgcaacaaagcatacttaatacggttaaaaacaatcagttaccagaggatatcaaaagctccctggtttcctgtgtcgatatattcaaggttttgattaaacaatattatgattatccttatgattgtcgtgatgatttagtcgatgacgacaaactcattcatctcatggctgccgtacgagactgtgagtggagtgacgataacgcactcaccataaatgtgcagtttaatgatttccctggattttatgactggatggattaccctgatcacccggttaagtttgtttttcacatacttgaaaatcaaaaagggacagtttgggtatatgaccaggatgatgcgtttcttgatattaaagcaaacgtgcaggctggacgctttaccgggcttaagaaattagtgcagtttatcgatagtgtgcgaacagattgcaaatgtattcttcttgaataccatatgcctttgctgagaattttccctaaagggaaagagtgtatgcatgtggaaaaatggcttcgcgaaatgagctctattccggagacagacgcgcccattaagcaggcgcttgcgcatggattattattacacttaaaaaatatctaccctgtttttcctgaaagtctggtgatgttattgctctctgttctggacgtaaaaacatacagagatgatgcgcgattaaatgaatggatatctaatagagtgcaggaattaggtgacagatattatcctgtaaataagcacgttaaaatccgctacactctttaattcagaaagggttccacctgcaagttgttattccacctgagagtgaatcgcaatgcaggtaatcatttcatctgtatatctgtatgccaactggcattccatctcttttttcgccgatattttgttgtgatcggcgacacttcgcttaaaaaagcaccagtagtggtttcgcagccatgcggtgtataaaaaatgatctcatgcagatgttttgtgaatgtgttggttgacattcatatgaaaaaaatcataattccatcatgtttgtgtggggtcttttctgtatcttacgcatcgcactcaagcctgacagaaaatatgctgtaaggctcatatcaaaaaccgccattagctcatcaggaagagcagacgacaaccaggattgttgtatggtacggggttcgaggcctcgatggcggtccaacttttcaaaactcttctgaatcagatccccttattaagttccctgcaaagtggaacattgccattgtttggctatagtggatggggcagaccaatgaaaaaagcccacacaggggagagtgggctgaaatgggaggctaaagacagtagtaaacttatcggaaataaggaccacgcattacgggggctaagtagcccgatggccgtgattcggcaaatcaggttgattacgtaaagagtaaattatctgctcaccgctgcgtcaccccttcgtaaatcaggcgtagcgcgaatacaccaataattgcaccaataacccgactggcaacgcgttgcatacgcccataagcacgacgcacagcgggcaaagaaaacgcctgactaagaaaaactcgccagataatacttgcgagcacaatccccgcccaggccattaaacgtgcccatgttggtgtttctgcatttaatgttacactgaaaatactgataaaaaataaaacggtttgcgggttagagagatcggtaattaatccgcggcgaaaaaagacataccagggggcgctaatcggttgttgtagtgtgctcatttgcggtgtactctggcggcgcatgctgcaccacgcaaaccataagagataagcgccgccgacgattctgataaggctaaaaatctcctcacactgcgtaattagcgttgcaagaccaaacaaacccaacccggaataaaatgcatcgcccagcgccacgcccagcccggtcagcacccctgcgcgtcgaccggaagccaggctggtttgtactaccacaaagagattggctcccggattaaaaaaagtaatcacgaacagtcctacggtcaggtaaacggcatgcaaaggatccatagtgatttcatccataaataagtgaactaactgcatcatatttctaccaaaaataatcgggtgcgagagagatcacaaagtgtcttatttccggttactggcgtttatgccctgactgaactaattattaatcaacccaataatgtgggtgggtgatagtgtgataacaactctggagccgtaatatgaaaataatctctaaaatgttagtcggtgcgttagcgttagccgttaccaatgtctatgccgctgaattgatgaccaaagcggaatttgaaaaagttgaaagccagtatgaaaaaataggtgatattagtaccagcaatgaaatgagcactgcagatgcaaaagaagatttgatcaaaaaagcggatgaaaaaggggctgatgtgttggtactgacctccggtcaaactgacaataagatccacggcacggcaaatatttataagaagaagtaattctgaatcctatgtaaacatctccgatgcgtaagtttatcggtgatcatctattgaaatttatgccggataaagcgttcgcgctgcattcggcagttcagcttttcagccgccgccagaacgtcgtccggctgatgcctaaataattcgccgctgctgttttatcgccattaaatttctccagtgcctgttgtggtgtcagtaagcgtggagcgggagttttcgcgctctcgcgcgccagttccggcagtagcagttgcataaactgcggcgttaaatccggcgtcggttccacacttaaaaacagcgccagtcgttccatcatattgcgcagttcacgaatattgcctggccagtcgtagtgcagcagcacagtttcacttgcctgtaacccctggcgtaatgcagcagaaaatggggcggagagcgccgccagagacactttcaaaaagctttccgccagcggaagaatatccgccacccgctcgcgcagtggtggcaattgcagacgcaaaatactcagccgataaaacagatcacggcgaaaacgtccttgctgcatatcttcttccagattgcagtgagtggcgctaatgacccgtacatctaccggaacaggctgatgcccgccgacgcgggtgacctctttttcttccagcacccgcagcagccgggtctgcaaaggtagcggcatttcgccaatctcatccagaaacagcgtaccgccgtgggcaatttcgaacagcccggcgcgacctccgcgtcggctgccggtaaacgccccttcctcatagccaaacagttctgcttccagcaggctttcggcaatcgccccgcagttgacggcaacaaacggatggctctttttgccctgtcgcgcatcgtggcgggcaaaatattcccgatgaatcgcctgggccgccagctctttgcccgtccccgtttccccctcaatcaacaccgccgcactggagcgggcatacagcaaaatagtctgccgtacttgttccatctgtggactttgaccgagcatatcgcccagcacgtaacgagtacgcagggcgttgcgggtggcatcgtgagtgttatggcgtaagctcatgcgcgtcatatccagcgcatcgctgaacgcctggcgcacggtggcggcggaatagataaaaattccggtcattccggcttcttctgccaaatcggtaatcagccctgcgccgaccaccgcttcggtgccgttagcttttagctcgttaatctgcccgcgtgcgtcttcctcggtaatgtagctacgttggtcgaggcgcaaattaaaggttttttgaaacgccaccagcgctggaatggtttcctgataggtgacaacgccgatagaagaggtgagttttccggcttttgccagtgcctgtaacacatcgtagccgctcggtttaatcaaaataactggcacactcaggcggcttttcaggtacgcgccgttagagccagccgcgatgatggcgtcacagcgttcgtttgccagtttcttgcggatgtaggtcactgctttttcaaagccaagctgaataggggtaatgttcgccaggtgatcaaactcgaggctgatatcgcgaaacagctcgaacaggcgcgttacagataccgtccagataaccggtttgtcgtcattaagccgtggtggatgtgccatagcgcaccgcaaagttaagaaaccgaatattgggtttagtcttgtttcataattgttgcaatgaaacgcggtgaaacattgcctgaaacgttaactgaaacgcatatttgcggattagttcatgactttatctctaacaaattgaaattaaacatttaattttattaaggcaattgtggcacaccccttgctttgtctttatcaacgcaaataacaagttgataacaaaggatgggctatgtctctacactctccaggtaaagcgtttcgcgctgcactgactaaagaaaatccattgcagattgttggcaccatcaacgctaatcatgcgctgttggcgcagcgtgccggatatcaggcaatttatctttctggcggtggcgtggcggcaggtagcctggggctgcccgatctcggtatttctacccttgatgatgtgctgaccgacattcgccgtatcaccgacgtttgtagcctgccgctgctggtggatgcggatatcggttttggttctagcgcctttaacgtggcgcgcaccgtgaaaagcatgattaaagccggtgcggcaggattgcatattgaagatcaggttggtgcgaaacgctgcggtcatcgtccgaataaagcgatcgtcagcaaagaagagatggtggatcggatccgcgcggcggtggatgcgaaaaccgatcctgattttgtgatcatggcgcgcaccgatgctctggcggtagaggggctggatgcggcgatcgagcgtgcgcaggcctatgttgaagcgggtgccgagatgttgttcccggaggcgattaccgaactcgccatgtaccgccagtttgccgatgcggtgcaggtgccgatcctcgccaacatcaccgaatttggtgccacgccgctgtttaccaccgacgaattacgcagcgcccatgtcgcaatggcgctgtacccacttagtgcgttccgcgccatgaaccgcgccgctgaacatgtctacaacgtcctgcgccaggaaggcacgcagaaaagcgtcatcgacaccatgcagacccgcaacgagctgtacgaaagcatcaactactaccagtacgaagagaagctcgacaacctgtttgcccgtagccaggtgaaataaaaaacgcccgttgattgtattcgacagccgatgcctgatgcgtcgctgacgcgacttatcaggcctacgaggtgcactgaactgtaggtcggataagacggatggcgtcgcatccgacaaccgatgcctgatgcgccgctgacgtgacttatcaggcctacggggtgcactgaactgtaggtcggataagacgcatagcgtcgcatccgacaaccgatgcctgatgcgccgctgacgcgacttatcaggcctacggggtgcactgaactgtaggtcggataagacgcatagcgtcgcatccgacaaccgatgcctgatgcgccgctgacgcgacttatcaggcctacggggtgaactgaactgtaggtcggataagacgcatagcgtcgcatccgacaacaatctcgaccctacaaatgataacaatgacgaggacaacatgagcgacacaacgatcctgcaaaacagtacccatgtcattaaaccgaaaaaatctgtggcactttctggcgttccggcgggcaatacggcgctctgcaccgtgggtaaaagtggcaatgacctgcattaccgcggctacgatattcttgatctggcgaaacattgcgaatttgaagaagtggcgcatctgctgatccacggcaaactgccgacccgtgacgaactcgccgcttacaaaacgaaactgaaagccctgcgcggtttaccggctaacgtgcgtaccgtgctggaagccttaccggcggcgagccacccgatggatgttatgcgcaccggtgtttccgcgctcggctgcacgctgccagaaaaagaggggcataccgtctctggcgcgcgggatattgccgacaaactgctggcgagccttagcagcattctcctttattggtatcactacagccacaacggcgaacgcatccaaccggaaaccgatgacgactccatcggcggtcacttcctgcatctgctgcacggcgaaaagccaagccaaagctgggaaaaggcgatgcatatcagcctggtgctgtacgccgaacacgagtttaacgcctccacctttaccagtcgggtgattgcgggcaccggctctgatatgtattccgcgattattggcgcgattggcgcactgcgcgggccaaaacacggcggggcgaatgaagtgagcctggagatccagcaacgctacgaaacgccggacgaagccgaagcagatatccgcaagcgcgtggaaaacaaagaagtggtcattggttttggtcatccggtttacaccatcgctgacccgcgccaccaggtgattaaacgtgtggcgaagcagctcagccaggaaggcggcagcctgaagatgtacaacatcgccgatcgcctggaaacggtgatgtgggagagcaaaaagatgttccccaatctcgactggttctctgctgtttcctacaacatgatgggcgttcccaccgagatgttcacaccactgtttgttatcgcccgcgtcaccggctgggcggcgcacattatcgaacaacgtcaggacaacaaaattatccgtccttccgccaattatgttggaccggaagaccgcccgtttgtcgcgctggataagcgccagtaaacctctacgaataacaataaggaaacgtacccaatgagtgctcaaatcaacaacatccgcccggaatttgatcgtgaaatcgttgatatcgtcgattacgtcatgaactacgaaatcagctctaaagtggcctacgacaccgcacattactgcctgctcgacacgctcggctgcggtctggaagctctcgaatacccggcctgtaaaaaactgctggggccaattgttcccggcaccgtcgtacccaacggcgtgcgcgtccccggaactcagttccagctcgaccccgtccaggcggcatttaacatcggcgcgatgatccgctggctcgatttcaacgatacctggctggcggcggagtggggccatccttccgacaacctcggcggcattctggcaacggcggactggcttagccgcaacgcggtcgccagcggcaaagcgccgttgaccatgaaacaggtgctgaccgcaatgatcaaagcccatgaaattcagggctgcatcgcgctggaaaactcctttaaccgcgtcggcctcgaccacgttctgttagtgaaagtggcttccaccgccgtggtcgccgaaatgctcggcctgacccgcgaggaaattctcaacgccgttagcctggcgtgggtggacggtcagagcctgcgcacctatcgccatgcgccgaacaccggcacgcgtaaatcctgggcggcgggcgatgccacttcccgcgcggtacgtctggcactgatggcgaaaacgggcgaaatgggttacccgagtgccctgactgcgccggtgtggggcttctacgacgtctcctttaaaggtgaaagcttccgcttccagcgcccgtacggttcctacgttatggaaaatgtgctgttcaaaatctccttcccggcggagttccactcccagacggcagttgaagcagcgatgacgctctatgaacagatgcaggcagcaggcaaaacggcggcggatatcgaaaaagtgaccattcgcacccacgaagcctgtattcgcatcatcgacaaaaaagggccgctcaataacccggcagaccgcgatcactgcattcagtacatggtggcgatcccgctgctattcgggcgcttaacggcggcagattacgaggacaacgttgcgcaagataaacgcattgacgccctgcgcgagaagatcaattgctttgaagatccggcatttaccgctgactaccacgacccggaaaaacgcgccatcgccaatgccattacccttgagttcaccgacggcacacgatttgaagaagtggtggtggagtaccccattggtcatgctcgccgccgtcaggatggtattccgaaactggtcgataaattcaaaatcaatctcgcgcgccagttcccgactcgccaacagcagcgcattctggaggtttctctcgacagagctcgcctggaacagatgccggtcaatgagtatctcgacctgtacgtcatttaagtaaacggcggtaaggcgtaagttcaacaggagagcattatgtcttttagcgaattttatcagcgtagcattaacgaaccggagcagttctgggccgagcaggcccggcgtattgactggcagacgccctttacgcaaacgctcgatcacagcaatccgccgtttgcccgttggttttgtgaaggccgaaccaacttgtgccacaacgccatcgaccgctggctggagaaacagccagaggcgctggcgctgattgccgtctctagcgaaacagaagaagagcgcacctttacctttcgtcagctgcatgacgaagtgaacgcggtggccagtatgttgcgtagtttgggtgtgcagcgcggcgatcgggtgctggtgtatatgccgatgattgccgaagcgcatattactctgctggcctgcgcgcgcattggcgctattcacagcgtggtgtttggtggatttgccagccacagcgtggcggcgcgaattgatgacgctaaaccggtgctgattgtcagcgctgatgccggagcgcgcggtggcaaaatcattccctataaaaaattgctcgacgatgcgataagtcaggcgcagcaccagccacgccatgttttgctggtggatcgcgggctggcgaaaatggcgcgcgtcagcgggcgggatgtcgatttcgcgagcttgcgccatcaacacatcggcgcgcgggtaccggtggcgtggctggaatccaacgaaacctcctgcattctctacacttccggcacgaccggcaaacctaaaggcgtgcagcgtgacgtcggcggatatgcggtggcgctggcgaccagcatggacaccatttttggcggcaaagcgggcagcgtgttcttttgcgcaagcgatatcggctgggtggtggggcatagctatatcgtttacgcgccgctgctggcggggatggcgactatcgtttacgaaggattgccgacctggccggactgcggcgtgtggtggacaatcgtcgagaaatatcaggttagccggatgttcagtgcgccgaccgccattcgcgtgctgaaaaaattccctaccgctgaaattcgcaaacacgatctcagcagcctggaagtgctctatctggctggagaaccgctggacgagccgaccgccagttgggtgagcaatacgctggatgtgccggtcatcgacaactactggcagaccgaatccggctggccgattatggcgattgctcgcggtctggacgacaggccgacgcgtctgggaagccccggtgtgccgatgtatggctataacgtgcagttgcttaatgaagtcaccggcgaaccgtgtggcgtcaacgagaaagggatgctggtggtggaagggccgctgccgccggggtgtattcagaccatctggggcgacgacggccgctttgtgaagacttactggagcctgttttcccgcccggtgtacgccacctttgactggggcatccgtgacgctgacggttatcactttattctcgggcgcactgacgatgtaattaacgttgccgggcatcggctggggacgcgcgagattgaagagagtatctccagccatccgggcgttgccgaagtggcggtggttggggtgaaagatgcgctgaaagggcaggtggcggtggcgtttgtcattccgaaagagagcgacagtctggaagatcgtgatgtggcgcacagccaagagaaggcgattatggcgctggtggacagccagattggcaactttggccgcccggcgcacgtctggtttgtcagccaattgccaaaaacgcgatccggaaaaatgctgcgccgcacgatccaggcgatttgcgaaggacgcgatcctggagatctgacgaccattgatgatcctgcgagcttggatcagatccgccaggcgatggaagagtaagttattgtcggatgcgtcgcgcggtgcatccggcactgtgtgccgatgcctgatgcgacgctgacgcgttttatcatgcctacggacctgaaccgtaggtcggataaggcgctcgcgtcgcatccgacaccatgctcagatgcctgatgcgacgctgacgcgtcttatcaggcctacccactgtttttacaccgataatttttcccccacctttttgcactcattcatataaaaaatatatttccccacgaaaacgattgctttttatcttcagatgaatagaatgcggcggattttttgggtttcaaacagcaaaaagggggaatttcgtgagccaagataacaactttagccaggggccagtcccgcagagcgcgcggaaaggggtattggcattgacgttcgtcatgctgggattaaccttcttttccgccagtatgtggaccggcggcactctcggaaccggtcttagctatcatgatttcttcctcgcagttctcatcggtaatcttctcctcggtatttacactagttttctcggttacattggcgcaaaaaccggcctgaccactcatcttcttgctcgcttcagctttggtgttaaaggcagttggctgcctagtctgctactgggcggaactcaggttggctggtttggcgtcggtgtggcgatgtttgccattccggtgggtaaggcaaccgggctggatattaatttgctgattgccgtttccggtttactgatgaccgtcaccgtcttttttggcattagcgcgctgacggttcttagcgtgattgcggttccggctatcgcctgcctgggcggttattccgtgtggctggctgttaacggcatgggcggcctggacgcattaaaagcggtcgttcccgcacaaccgttagatttcaatgtcgcgctggcgctggttgtggggagttttatcagtgcgggtacgctcaccgctgactttgtccggtttggtcgcaatgccaaactggcggtgctggtggcgatggtggcctttttcctcggcaacagcttgatgtttattttcggtgcagcgggcgctgcggcactgggcatggcggatatctctgatgtgatgattgctcagggcctgctgctgcctgcgattgtggtgctggggctgaatatctggaccaccaacgataacgcactctatgcgagcggtttaggtttcgccaacattaccgggatgagcagcaaaacccttagcgtaatcaacggtattatcggtacggtctgcgcattatggctgtataacaattttgtcggctggttgaccttccttagcgcagctattcctccagtgggtggcgtgatcatcgccgactatctgatgaaccgtcgccgctatgagcactttgcgaccacgcgtatgatgagtgtcaattgggtggcgattctggcggtcgccttggggattgctgcaggccactggttaccgggaattgttccggtcaacgcggtattaggtggcgcgctgagctatctgatccttaacccgattttgaatcgtaaaacgacagcagcaatgacgcatgtggaggctaacagtgtcgaataactaagacgcatgtggaggctaacagtgagcaataacgctttacaaacaattattaacgcccggttaccaggcgaagaggggctgtggcagattcatctgcaggacggaaaaatcagcgccattgatgcgcaatccggcgtgatgcccataactgaaaacagcctggatgccgaacaaggtttagttataccgccgtttgtggagccacatattcacctggacaccacgcaaaccgccggacaaccgaactggaatcagtccggcacgctgtttgaaggcattgaacgctgggccgagcgcaaagcgttattaacccatgacgatgtgaaacaacgcgcatggcaaacgctgaaatggcagattgccaacggcattcagcatgtgcgtacccatgtcgatgttagcgatgcaacgctaactgcgctgaaagcaatgctggaagtgaagcaggaagtcgcgccgtggattgatctgcaaatcgtcgccttccctcaggaagggattttgagctatcccaacggtgaagcgttgctggaagaggcgttacgcttaggggcagatgtagtgggggcgattccgcattttgaatttacccgtgaatacggcgtggagagcctgcataaaaccttcgccctggcgcaaaaatacgaccgtctcatcgacgttcactgtgatgagatcgatgacgagcagagccgctttgtcgaaaccgttgctgccctggcgcaccatgaaggcatgggcgcgcgagtcaccgccagccacaccacggcaatgcactcctataacggggcgtataccagtcgcctgttccgcttgctgaaaatgtccggtattaactttgtcgccaacccgctggtcaatattcatctgcaaggacgtttcgatacgtatccaaaacgtcgcggcatcacgcgcgttaaagagatgctggagtccggcattaacgtctgctttggtcacgatgatgtcttcgatccgtggtatccgctgggaacggcgaatatgctgcaagtgctgcatatggggctgcatgtttgccagttgatgggctacgggcagattaacgatggcctgaatttaatcacccaccacagcgcaaggacgttgaatttgcaggattacggcattgccgccggaaacagcgccaacctgattatcctgccggctgaaaatgggtttgatgcgctgcgccgtcaggttccggtacgttatagcgtacgtggcggcaaggtgattgccagcacacaaccggcacaaaccaccgtatatctggagcagccagaagccatcgattacaaacgttgaacgactgggttacagcgagcttagtttatgccggatgcggcgtgaacgccttatccggcctacgtagagcactgaactcgtaggcctgataagcgtagcgcatcaggcaattccagccgctgatctgtgtcagcggctaccgtgattcattcccgccaacaaccgcgcattcctccaacgccatgtgcaaaaatgccttcgcagcggctgtctgccagctgtagtttatgccggatgcggcgtgaacgccttatccggcctacgtagagcactgaactcgtaggcctgataagcgtagcgcatcaggcaattccagccgcagacctgtgtcagcggttaccgactttcatttccgccaacaaccgcgcatttatccaacgccatgtgcaaaaatgccttcgcggcggctgtctgccagctatttttccgccgcaacaaaaccgccgttctctccagtagtggcggggcaagagaaatagctttaagcccgtcatgttgtgtggcaatcgctgctggtaacaatgtggaaagggaagtgcggcgaatcagctccagaaccgcgctaatactgttcgcctcaatgaccacctgtggatgtagccccgctttctcgcagtagtggtcaatttgctctctggtggcaaattccgcgctgagcaggaccagtttttcatcatgcaagcgactcaacgccacctgttcatggacggccagcggatgatgttgcgccacgactaacgctaaactttctgtcagtaaaggaattgcctccagctccgggctatgcacaggcgcgaaggcaatcccaacgtccaactcgtcgcggcaaagcatatcctcgattttctcctggctcatttcctgtagctggagcgtgatgctgggatagcgcgcatagaaatccgccattaaggggccgataaagtagctcgtaaaggtgggggtgacggcgatacgcaggcttcctcgcgtcagatcggcaacatcatgaatcgcccgtttacccgcccccagttcctgtaacgcccggctggcgtactgtcgccagacttctcctgcatcagtgagacgaatcgttcgcccgctacggtcaaacagcggcacgcctaaactctcctctaactggcgaatctgctgggaaagcgcaggttgggagacgtgcaacgcactggcggcacgggtgaagctgccatgttcagccacggcaagaaaataattgatatgtcgagagagcattcgcaacctataagtaaatccaatggaactcatcataaatgagacttttaccttatgacaatcggcgagtagtctgcctctcattccagagacagacagaggttaacggtgaaagagattattgatggattccttaaattccagcgcgaggcatttccgaagcgggaagccttgtttaaacagctggcgacacagcaaagcccgcgcacactttttatctcctgctccgacagccgtctggtccctgagctggtgacgcaacgtgagcctggcgatctgttcgttattcgcaacgcgggcaatatcgtcccttcctacgggccggaacccggtggcgtttctgctagcgtggagtatgccgtcgctgcgcttcgggtatctgacattgtgatttgtggtcattccaactgtggcgcgatgaccgccattgccagctgtcagtgcatggaccatatgcctgccgtctcccactggctgcgttatgccgatagtgcccgcgtcgttaatgaggcgcgcccgcattccgatttaccgagtaaagctgcggcgatggtacgtgaaaacgtcattgctcagttggctaatttgcaaactcatccaagcgtgcgcctggcgctcgaagaggggcggatcgccctgcacggctgggtctacgacattgaaagcggcagcatcgcagcttttgacggcgcaacccgccagtttgtgccactggccgctaatcctcgcgtttgtgccataccgctacgccaaccgaccgcagcgtaaccttatttttaaaccatcaggagttccaccatgattcagagtcaaattaaccgcaatattcgtcttgatcttgccgatgccattttgctcagcaaagctaaaaaagatctcagttttgccgagattgccgacggcaccggtctggcagaagcctttgtaaccgcggctttgctgggtcagcaggcgcttcctgccgacgccgcccgcctggtcggggcgaagctggatctcgacgaagactccattctactgttgcagatgattccactgcgtggctgcattgatgaccgtattccaactgacccaacgatgtatcgtttctatgaaatgttgcaggtgtacggtacaaccctgaaagcgttggttcatgagaaatttggcgatggcattattagcgcgattaacttcaaactcgacgttaagaaagtggcggacccggaaggtggcgaacgtgcggtcatcaccttagatggtaaacatctgccgaccaaaccgttctgacagccatgcgcaaccatcaaaagacgttcacgatgctgctggtactggtgctgattggtcttaatatgcgaccactgctcacctccgtcgggccactgctaccgcaattgcgccaggcgagcggaatgagctttagcgtggctgccctgttgaccgctctgccggtggttaccatgggcgggctggcgctggccggaagctggcttcatcagcatgtcagcgaacgtcgcagtgtcgccatcagtctgttgctgattgccgtcggtgcattgatgcgtgagctttacccgcaaagtgcgctgctgcttagcagcgcactgcttggtggggtggggatcggcatcattcaggcggtgatgcctagcgtgattaaacggcggtttcagcagcgcacgccactggtgatggggctgtggtccgcggctctgatgggcggcggtgggcttggtgccgccataacgccctggttagttcaacatagcgaaacctggtatcaaacactcgcctggtgggcgctgcctgccgttgttgcgctctttgcctggtggtggcaaagcgcccgcgaggtcgcctcttcccacaagacaacaaccactccggttcgcgtggtattcactccccgcgcgtggacgctgggtgtttacttcggtctgattaacggcggttacgccagcctgattgcctggttacccgctttctatattgagattggtgccagcgcgcagtacagcggttccttactggcattgatgacgcttgggcaagccgcaggagctttgctgatgcctgctatggctcgccatcaggatcggcgcaaactgttaatgctggcgctggtgttacaactggtggggttctgcggctttatctggctgccgatgcaattgccggtattgtgggcgatggtgtgtgggttaggtctgggcggcgcgtttccgctctgtttgctgctggcgctcgatcactctgtgcaaccggctattgctggcaagctggtggcgtttatgcagggaatcggttttatcatcgccgggcttgccccgtggttttctggcgtgctgcgtagtatcagcggcaattacctgatggactgggcatttcatgcgctgtgcgtcgttgggctgatgatcataaccctgcgttttgcaccagtacgttttccgcagctgtgggtcaaagaggcatgatgcgacgcttgttcctgcgctttgttcatgccggatgcggctaatgtagatcgctgaacttgtaggcctgataagcgcagcgtatcaggcaatttttataatttaaacactgctttcaactttataatctttgaaataatagtgcttatcccggtcgtttatttcgcgaataacccgacaaggaacgccagccgccacgacgtttggtggaatgtcttttgtgacgatactacccgcgccaataacagaattatccccgatggtgacgcctggattaataaccacatgacttccgatccagacgttattgccaatcgttatcggaaaagagtacatctcgccgttttttctcaattcatggtgtacagggtgtcccgtaacggaaagagtaacgttgggtgcaatcagtacgttatcaccgattgttaccgtgtagtcatcgacaatggttaaattgaaatttgcataaaaattgcggcctatatggatgttggaaccgtaagagaaatagacaggcggttctacccaggcgttttcccctaccgtggcaaacatttctttaatcaggctttctcttttttcaacttcacttggatggctgtgattaaactcatacattaacgttttcccacgaagtcttttttccggtaagccttcgcacatatcggtaaatagcttgcctgctcttattctttcggtcattggcatgttcaatgcgatcactccgttatgatatgttggtcggataaggcgctcgcgccgcatccgacattgattgcttaagcgacttcattcacctgacgacgcagcagggaaagcgggccggggccgctaagcgtgaacacggaaattaaggtgaagcccagcgccaccagacccagcaccagataagcgccctggaaaccgatgctttcatacatattgcccgccagtacagacataaaaatcatcgccagttgcttaaagaagcagaaacagaccagataaatcgtcgcactaaaacgcacttcaaactggctggtaatatatttaaagcagcccaccagcaggaacggtacttcaaacatatgcagcgttttcagaataaccacttccagcgcactggtggcgaagctactgccaataatacgtacagacataatagtgccagccagcagcagggcgtttttcccaccgatgcgattaatgatcagtggcgcaaagaacataatgctggcgttaagtaattcgcccattgtcgttacgtagccaaatacccgcgtaccctgttcaccggtagcaaagaagctagtaaagaaattagcaaactgttggtcaaaaacatcgtaggtgcaggaaacgccaataacatacagactcaaaaaccacagttttggctgtctgaacagttccagtgccagcttaaggctaaatgcgctatggttggcacctaccgcattggcaaccgtggcagaagagggcgcatccgttttggcgaaaaagagtaaaacggcgaggatgagtgcacagccagagcccagccagaaaacaaactgattattgatggtgaacatgatgccgacaatgctggcacacagcgcccagccaacacagccaaacatccgcgcgcgaccaaattcgaaattactgcgacggctgactttctcaataaatgcctctactgctggcgcaccggcgttaaaacaaaagcctagataaataccaccaacaatgcttcctactaaaatgttgtattgtaacagtggcccgaagataaaaataaagaacggcgcaaacatcactaacatgccggtaataatccacagcaggtatttgcgcagcccgagtttgtcagaaagcagaccaaacagcggttggaataataggctgaacagagaaatagcggcaaaaataatacccgtatcacttttgctgatatggttgatgtcatgtagccaaatcgggaaaaacgggaagtaggctcccatgataaaaaagtaaaagaaaaagaataaaccgaacatccaaaagtttgtgttttttaaatagtacataatggatttccttacgcgaaatacgggcagacatggcctgcccggttattattatttttgacaccagaccaactggtaatggtagcgaccggcgctcagctggaattccgcgcttacactcgggctccaggagtcgtcgccaccaatccccatatggaaaccgtcgatattcagccatgtgccttcttccgcgtgcagcagatggcgatggctggtttccatcagttgctgttgactgtagcggctgatgttgaactggaagtcgccgcgccactggtgtgggccataattcaattcgcgcgtcccgcagcgcagaccgttttcgctcgggaagacgtacggggtatacatgtcactcaatggcagatcccagcggtcaaaacaggcggcagtaaggcggtcgggatagttttcttgcggccctaatccgagccagtttacccgctctgctacctgcgccagctggcagttcaggccaatccgcgccggatgcggtgtatcgctcgccacttcaacatcaacggtaatcgccatttgaccactaccatcaatccggtaggttttccggctgataaataaggttttcccctgatgctgccacgcgtgagcggtcgtaatcagcaccgcatcagcaagtgtatctgccgtgcactgcaacaacgctgcttcggcctggtaatggcccgccgccttccagcgttcgacccaggcgttagggtcaatgcgggtcgcttcacttacgccaatgtcgttatccagcggtgcacgggtgaactgatcgcgcagcggcgtcagcagttgttttttatcgccaatccacatctgactaagaaagccactctggcggttaaattgccaacgcttattacccagctcgatgcaaaaatccatttcgctggtggtcagatgcgggatggcgtgggacgcggcggggagcgtcacactgaggttttccgccagacgccactgctgccaggcgctgatgtgcccggcttcactccatgcggtcgcgttcggttgcactacgcgtactgtgagccagagttgcccggcgctctccggctgcggtagttcaggcagttcaatcaactgtttaccttgtggagcgacatccagaggcacttcaccgcttgccagcggcttaccatccagcgccaccatccagtgcaggagctcgttatcgctatgacggaacaggtattcgctggtcacttcgatggtttgcccggataaacggaactggaaaaactgctgctggtgttttgcttccgtcagcgctggatgcggcgtgcggtcggcaaagaccagaccgttcatacagaactggcgatcgttcggcgtatcgccaaaatcaccgccgtaagcgctccacgggttgccgttttcatcatatttaatcaggctctgatccacccagtcccagacgaagccgccctgtaaacggggatactgacgaaacgcctgccagtatttagcgaaaccgccaagactgttacccatcgcgtgggcgtattcgcaaaggatcagcgggcgcgtctctccaggtaggctaagccattttttgatggaccatttcggcacagccgggaagggctggtcttcatccacgcgcgcgtacatcgggcaaataatatcggtggccgtggtgtcggctccgccgccttcatactgcaccgggcgggaaggatcgacagatttgatccagcgatacagcgcgtcgtgattagcgccgtggccactttcattccccaggctccagatgatcacactcgggtgattacgatcgcgctgcaccattcgcgttacgcgttcgctcatcgccggtagccagcgcggatcatcggtcagacgattcattggcaccatgccgtgggtttcaatattggcttcatccaccacatacaggccgtagcggtcgcacagcgtgtaccacagcggatggttcggataatggctacagcgcacggcgttaaagttgttctgcttcatcagcaggatatcctgcaccatcgtctgctcatccatgacctgaccatgcagaggatgatgctcgtgacggttaacgcctcgaatcagcaacggcttgccgttcagcagcagcagaccattttcaatccgcacctcgcggaaaccgacatcgcaggcttctgcttcaatcagcgtgccgtcggcggtgtgcagttcaaccaccgcacgatagagattcgggatttcggcgctccacagtttcgggttttcgacgttcagacgtagtgtgacgcgatcggcataaccaccacgctcatcgataatttcaccgccgaaaggcgcggtgccgctggcgacctgcgtttcaccctgccataaagaaactgttacccgtaggtagtcacgcaactcgccgcacatctgaacttcagcctccagtacagcgcggctgaaatcatcattaaagcgagtggcaacatggaaatcgctgatttgtgtagtcggtttatgcagcaagctgacgtcacggaaaatgccgctcatccgccacatatcctgatcttccagataactgccgtcactccagcgcagcaccatcaccgcgaggcggttttctccggcgcgtaaaaatgcgctcaggtcaaattcagacggcaaacgactgtcctggccgtaaccgacccagcgcccgttgcaccacagatgaaacgcgctgttaacgccatcaaaaataattcgcgtctggccttcctgtagccagctttcatcaacattaaatgtgaggctgtaacaacccgtcggattctccgtgggaacaaacggcggattgaccgtaatgggataggtcacgttggtgtagatgggcgcatcgtaaccgtgcatctgccagttactggggacgacgacagtatcggcctcaggaagatcgcactccagccagctttccggcaccgcttctggtgccggaaaccaggcaaagcgccattcgccattcaggctgcgcaactgttgggaagggcgatcggtgcgggcctcttcgctattacgccagctggcgaaagggggatgtgctgcaaggcgattaagttgggtaacgccagggttttcccagtcacgacgttgtaaaacgacggccagactatccgtaatcatggtcatagctgtttcctgtgtgaaattgttatccgctcacaattccacacaacatacgagccggaagcataaagtgtaaagcctggggtgcctaatgagtgagctaactcacattaattgcgttgcgctcactgcccgctttccagtcgggaaacctgtcgtgccagctgcattaaactatcggccaacgcgcggggagaggcggtttgcgtattgggcgccagggtggtttttcttttcaccagactgacgggcaacagctgattgcccttcaccgcctggccctgagagagttgcagcaagcggtccacgctggtttgccccagcaggcgaaaatcctgtttgatggtggttaacggcgggatataacaactgctgtcttcggtatcgtcgtatcccactacgctgatatccgcaccaacgcgcagcccggactcggtaatggcgcgcattgcgcccagcgccatctgatcgttggcaaccagcatcgcagtgggaacgatgccctcattcagcatttgcatggtttgttgaaaaccggacatggcactccagtcgccttcccgttccgctatcggctgaatttgattgcgagtgagatatttatgccagccagccagacgcagacgcgcgctgacagaacttaatgggcccgctaacagcgcgatttgctggtgacccaatgcgaccagatgctccacgcccagtcgcgtaccgtcttcatgggagaaaataatactgttgatgggtgtctggtcagagacatcaagaaataacgccggaacattagtgcaggcagcttccacagcaatggcatcctggtcatccagcggatagttaatgatcagcccactgacgcgttgcgcgagaagattgtgcaccgccgctttacaggcttcgacgccgcttcgttctaccatgctcaccaccacgctggcacccagttgatcggcgcgagatttaatcgccgcgacaatttggctcggcgcgtgcagggccagactggaggtggcaacgccaatcagcaagctctgtttgcccgccagttgttgtgccacgcggttgggaatgtaattcagctccgccatcgccgcttccactttttcccgcgttttcgcagaaacgtggctggcctggttcaccacgcgggaaacggtctgataagagacaccggcatactctgcgacatcgtataacgttactggtttcacattcaccaccctgaattgactctcttccgggcgctatcatgccataccgcgaaaggttttgcgccattcgatggtgtcaacgtaaatgcatgccgcttcgccttccggccaccagaatagcctggctttcaaccccttcttcgatctgttttgctacccgttgtagcgccggaagatgcttttccgctgcctgttcaatggtcattgcgctcgccatatacaccagattcagacagccaatcacccgttgttcactgcgcagcggtacggcgatagaggcgatcttctcctcctgatcccagccgcggtagttctgtccgtaaccctctttgcgcgcgcgcgccagaatggcttccagctttaacggttcccgtgccagttgatagtcatcaccggggcgggaggctaacatttcgattaattccttgcggtcttgttccgggcaaaaggccagccaggtcaggccgctggcggttttcagaagcggcaaacgtcgcccgaccattgcccggtgaaaggataagcggctgaaacggtgagtggtttcgcgtaccaccattgcatcaacatccagcgtggacacatctgtcggccataccacttcgcgcaacagatcgcccagcagtggggccgccagtgcagaaatccactgttcgtcacgaaatccttcgcttaattgccgcactttgatggtcagtcgaaaactatcatcggaggggctacggcggacatatccctcttcctgcagcgtctccagcagtcgccgcacagtggtgcgatgcaggccgctgagttccgccagcagcccgacgctggcaccgccatcaagtttatttaacatatttaataacattagaccgcgggttaagccgcgcacggttttgtattccgtctgctcattgttctgcatattaatactcatttctatagttaaaacaacgtggtgcacctggtgcacattcgggcatgttttgattgtagcgctaaacacccttcctatactgagcgcacaataaaaaatcatttacatgtttttaacaaaataagttgcgctgtactgtgcgcgcaacgacattttgtccgagtcgtgaggtactgaaatggcaatacaacaccctgacatccagcctgctgttaaccatagcgttcaggtggcgatcgctggtgccggcccggttgggctgatgatggcgaactatctcggccagatgggcattgacgtgctggtggtggagaaactcgataagttgatcgactacccgcgtgcgattggtattgatgacgaggcgctgcgcaccatgcagagcgtcggcctggtcgatgatgttctgccgcacactacgccgtggcacgcgatgcgttttctcaccccgaaaggccgctgttttgctgatattcagccaatgaccgatgaatttggctggccgcgccgtaacgcctttattcagccgcaggtcgatgcggtgatgctggaaggggtgagccgttttccgaatgtgcgctgcttgttttcccgcgagctggaggccttcagtcagcaagatgacgaagtgaccttgcacctgaaaacggcagaagggcagcgggaaatagtcaaagcccagtggctggtagcctgtgacggtggagcaagttttgtccgtcgcactctgaatgtgccgtttgaaggtaaaactgcgccaaatcagtggattgtggtagatatcgccaacgatccgttaagtacgccgcatatctatttgtgttgcgatccggtgcgcccgtatgtttctgccgcgctgcctcatgcggtacgtcgctttgaatttatggtgatgccgggagaaaccgaagagcagctgcgtgagccgcaaaatatgcgcaagctgttaagcaaagtgctgcctaatccggacaatgttgaattgattcgccagcgtgtctacacccacaacgcgcgactggcgcaacgtttccgtattgatcgcgtactgctggcgggcgatgccgcgcacatcatgccggtatggcaggggcagggctataacagtggtatgcgcgacgcctttaacctcgcatggaaactggcgttggttatccaggggaaagcccgcgatgcgctgctcgatacctatcaacaagaacgtcgcgatcacgccaaagcgatgattgacctgtccgtgacggcgggcaacgtgctggctccgccgaaacgctggcagggtacgttacgtgacggcgtttcctggctgttgaattatctgccgccagtaaaacgctacttcctcgaaatgcgcttcaagccgatgccgcaatattacggcggtgcgctgatgcgtgagggcgaagcgaagcactctccggtcggcaagatgtttattcagccgaaagtcacgctggaaaacggcgacgtgacgctgctcgataacgcgatcggcgcgaacttcgcggtaattggctggggatgcaatccactgtgggggatgagcgacgagcaaatccagcagtggcgcgcgttgggcacacgcttcattcaggtggtgccggaagtgcaaattcataccgcacaggataaccacgacggcgtactacgcgtgggcgatacgcaaggtcgcctgcgtagctggttcgcgcaacacaatgctagcctggtggtgatgcgcccggatcgctttgttgccgccaccgccattccgcaaaccctgggcaagaccctgaataaactggcgagcgtgatgacgctgacccgccctgatgccgacgtttctgtcgaaaaggtagcctgatatgcacgcttatcttcactgtctttcccacagcccgctggtggggtatgtcgacccggcgcaagaggtgctcgatgaggtcaatggcgtgattgccagcgcccgcgagcgtattgcggcattctcccctgaactggtggtgctgtttgcgccagatcactacaacggctttttctatgacgtgatgccaccgttctgtttaggcgttggagcgacggcaattggtgatttcggcagtgcggcaggagagctgcccgtgcctgtggagctggcggaggcctgtgcgcatgccgtcatgaagagcgggatcgatcttgccgtttcttactgtatgcaggtggaccacgggttcgcccagccgctggagttcctgctcggtgggctggataaggtgccagttctgcctgtgttcatcaacggtgtcgccacgccgctgcccggtttccagcgtacccgcatgttgggtgaagccattggacgtttcaccagcactctcaataaacgcgtgctgttcctgggttccggtgggctttcccatcagccgccggtgcccgaactggcgaaagccgatgcccatatgcgcgaccgtctgttggggagcgggaaagatttacccgccagtgagcgcgaattgcgtcagcaacgggtgattagcgccgctgagaagtttgttgaggatcagagaacgctgcatccgctcaacccgatttgggataaccagttcatgactttgctggagcagggacgcatacaggaactggatgccgtcagtaacgaagagctttccgccattgccggaaagagcacacatgaaatcaaaacctgggtcgccgcttttgccgctatttctgcgtttggcaactggcgtagcgaagggcgttattaccgcccaatcccggagtggattgccggatttggcagcttaagcgccagaacagagaactgaatatgcaggagaagatgatgagttatcagccacaaaccgaagccgccaccagccgttttctgaatgtagaagaagcgggtaaaacgctgcgcatccattttaatgactgcggacaaggcgacgaaaccgttgtcctgctgcatggttccggcccgggtgctactggctgggcgaacttcagccgcaatatcgatccgctggtagaggcgggctatcgggtgatcctgctggattgtccgggttggggcaagagcgatagcgtcgttaatagtggtagccgaagcgatcttaatgcacgaatcctgaaaagcgtggtggatcaactggatatcgccaaaatccacctgctgggcaacagcatggggggccatagttctgtggcgttcacccttaaatggccggagcgcgtcggcaaactggtgctgatgggcggcggtacgggcggcatgagtttgtttacgccgatgccaaccgaaggtattaagcgactgaatcagctttatcgtcagccgactatcgaaaacctgaagctgatgatggatatcttcgtttttgataccagcgatttgaccgacgccctgtttgaagcgcgcctgaataatatgctgagccgccgcgatcacctggaaaacttcgttaagagcctggaagctaatccgaaacagttcccggattttggcccacgtctggcggaaatcaaagcgcaaaccctgattgtctgggggcgcaacgaccgctttgtgccgatggatgcgggtctgcgtctgctgtccggcattgccggttctgaactgcatatcttccgcgactgtggtcactgggcgcagtgggaacatgccgacgctttcaatcaactggtgctgaatttcctcgcacgcccttaaggaatggtcatgacgaagcatactcttgagcaactggcggcggatttacgccgcgccgcagagcagggcgaagcgattgcaccgctgcgcgatctgattggtatcgataacgctgaagcggcttacgccattcagcacataaatgtgcaacatgacgttgcgcaggggcgtcgcgtggtagggcgtaaagtgggcctgacacatccgaaagtgcaacaacaactgggcgttgatcaaccggattttgggacgttatttgccgacatgtgttatggcgataacgaaatcattcctttttcccgtgttctgcaaccccgcattgaagcggagatcgcactggtgttgaaccgcgatttgcccgcaaccgatatcaccttcgacgaattgtataacgccattgaatgggtacttccggcgctggaagtggtggggagccgcattcgcgactggagcattcagtttgtcgataccgtggcagataacgcctcctgtggggtgtatgtcatcggcggtccggcgcaacgtccggcggggttagacctgaaaaactgcgccatgaagatgacgcgtaataacgaagaggtttctagcgggcgcggcagcgaatgcctgggacatccgcttaatgcggccgtctggctggcacgcaaaatggccagtctgggtgaaccgctgcgcaccggagatatcattcttaccggggcattaggtccgatggtggcggtgaatgcgggcgatcgttttgaagcccatattgaaggcataggtagtgttgctgcgacatttagtagcgcagccccaaaaggaagtctgagttgagctaagccccaaaaggaagtctgtcatgagtaagcgtaaagtcgccattatcggttctggcaacattggtaccgatctgatgattaaaattttgcgtcacggtcagcatctggagatggcggtgatggttggcattgatcctcagtccgacggtctggcgcgcgccagacgtatgggcgtcgccaccacccatgaaggggtgatcggactgatgaacatgcctgaatttgctgatatcgacattgtatttgatgcgaccagcgccggtgctcatgtgaaaaacgatgccgctttacgcgaagcgaaaccggatattcgcttaattgacctgacgcctgctgccatcggcccttactgcgtgccggtggttaacctcgaggcgaacgtcgatcaactgaacgtcaacatggtcacctgcggcggccaggccaccattccaatggtggcggcagttagtcgcgtggcgcgtgttcattacgccgaaattatcgcttctatcgccagtaaatctgccggacctggcacgcgtgccaatatcgatgaatttacggaaaccacttcccgagccattgaagtggtgggcggcgcggcaaaagggaaggcgattattgtgcttaacccagcagagccaccgttgatgatgcgtgacacggtgtatgtattgagcgacgaagctagtcaagatgatatcgaagccagtatcaatgaaatggctgaggcggtgcaggcttacgtaccgggttatcgcctgaaacagcgcgtgcagtttgaagttatcccgcaggataaaccggtcaatttaccgggcgtggggcaattctccggactgaaaacagcggtctggctggaagtcgaaggcgcagcgcattatctgcctgcctatgcgggcaacctcgacattatgacttccagtgcgctggcgacagcggaaaaaatggcccagagtctggcgcgcaaggcaggagaagcggcatgaacggtaaaaaactttatatcagcgacgtcacattgcgtgacggtatgcacgccattcgtcatcagtatagcctggaaaacgttcgccagattgccaaagcactggacgatgcccgcgtggatagcattgaagtggcccacggcgacggtttgcaaggttccagctttaactatggtttcggcgcacatagcgaccttgaatggattgaagcggcggcggatgtggtgaagcacgccaaaatcgcgacgttgttgctgccaggaatcggcactattcacgatctgaaaaatgcctggcaggctggcgcgcgggtggttcgtgtggcaacgcactgtaccgaagctgatgtttccgcccagcatattcagtatgcccgcgagctcggaatggacaccgttggttttctgatgatgagccatatgaccacgccggagaatctcgccaagcaggcaaagctgatggaaggctacggtgcgacctgtatttatgtggtggattctggcggtgcgatgaacatgagcgatatccgtgaccgtttccgcgccctgaaagcagagctgaaaccagaaacgcaaactggcatgcacgctcaccataacctgagtcttggcgtggcgaactctatcgcggcggtggaagagggctgcgaccgaatcgacgccagcctcgcgggaatgggcgcgggcgcaggtaacgcaccgctggaagtgtttattgccgccgcggataaactgggctggcagcatgggaccgatctctatgcgttaatggatgccgccgacgacctggtgcgtccgttgcaggatcgaccggtacgagtcgatcgcgaaacgctggcgctgggatacgctggtgtttacagcagcttcctgcgtcactgtgaaacggcggcggcgcgttatggcttaagtgcggtggatattctcgttgagctgggcaaacgccggatggttggcggccaggaggatatgatcgttgacgtggcgctggatctgcgcaacaacaaataatgatgactgccgagaacgtgcattttgtatgcccatcccagcacgactgccggatgcggcgtgaacgccttatccggcctacggatggcgtgagaatttgtaggtctgataagacgcgttagcgtcgcatcaggcatctgcgcacgactgccggatgcggcgtgaacgccttatccggcctacggatggcgcgggaatttgtaggcctgataagacgcgttagcgtcgcatcaggcatctgcgcacgactgccggatgcggcgtgaacgccttatccggcctacgggtggcgcgagaatttgtaggcctgataagacgcgttagcgtcgcatcaggcatctgcgcacgactgccggatgcggcgtaaacgccttatccggcctacggatggcgcgggaatttgtaggcctgataagacgcgttagcgtcgcatcaggcatctgcacacgactgccggatgcgataaacgtcttgtccggcctacatttcgcccgtaggcagtcattaaatagttctgattacgcggctggcaatgtatcagtcgcgattcacctgcactcgcaacgaggttcatcttatgagcactcgtacccctagtagttctagttcccgcctgatgctgaccatcgggctttgttttttggtcgctctgatggaagggctggatcttcaggcggctggcattgcggcgggtggcatcgcccaggctttcgcactcgataaaatgcaaatgggctggatatttagcgccggaatactcggtttgctacccggcgcgttggttggcggaatgctggcggaccgttatggtcgcaagcgcattttgattggcagtgttgcgctgtttggtttgttcagtctggcaacggcgattgcctgggatttccccagtctggtctttgcgcggctgatgaccggtgtcgggctgggggcggcgttgccgaatcttatcgccctgacgtctgaagccgcgggtccacgttttcgtgggacggcagtgagcctgatgtattgcggtgttcccattggcgcggcgctggcggcgacactgggtttcgcgggggcaaacttagcatggcaaacggtgttttgggtaggtggtgtggtgccgttgattctggtgccgctattaatgcgctggctgccggagagcgcggttttcgctggcgaaaaacagtctgcgccaccactgcgtgccttatttgcgccagaaacggcaaccgcgacgctgctgctgtggttgtgttatttcttcactctgctggtggtctacatgttgatcaactggctaccgctacttttggtggagcaaggattccagccaagccaggcggcaggggtgatgtttgccctgcaaatgggggcggcaagcgggacgttaatgttgggcgcattgatggataagctgcgtccagtaaccatgagcctactgatttatagcggcatgttagctagcctgctggcgcttggaacggtgagcagttttaacggtatgttgctggcgggatttgtcgcggggttgtttgcgacaggtgggcaaagcgttttgtatgccctggcaccgttgttttacagtagccagatccgcgcaacaggtgtgggaacagccgtggcggtagggcgtctgggggctatgagcggtccgttactggccgggaaaatgctggcattaggcactggcacggtcggcgtaatggccgcttctgcaccgggtattcttgttgctgggttggcggtgtttattttgatgagccggagaagtcgaatacagccgtgcgccgatgcctgacgtgccttattaggcaggggcgaaagggacttcaccccaatacacctacggcgtttacaggtatactcgctaaaaattattcagcgggtttggaaacaaagatggcaaaacttaccttacaagagcagttgctcaaagcaggattagtcaccagcaaaaaagcggcgaaggtggagagaacggcgaaaaaaagccgcgttcaggcgcgtgaagctcgggcggcggtagaagaaaataaaaaggcacagcttgagcgtgataaacagcttagcgaacagcaaaaacaagcggcgttggcgaaagaatataaagctcaggtgaagcagcttattgaaatgaaccgaatcaccattgccaatggcgatattggttttaacttcactgacggcaatctgattaagaagatttttgtcgataagctcacacaggcgcagttgattaatggtcgtctggcgattgcccgcttgttggtcgataacaatagcgaaggtgaatacgccattattcccgccagcgttgccgataaaattgctcagcgcgatgccagcagtatagtgttgcacagcgcgctcagcgccgaagagcaggatgaagacgacccgtatgccgacttcaaagtgcctgatgatttgatgtggtaaacatagataagtcgtgcgcagatgcctgatgcgacgctatgcgcgtcttatcaggcctacggtttatgggcgaagtgtagaccggataaggcgttcacgccgcatccggcagtcgtgcgccatgcctgatgcgacgctttgcgcgtcttatcaggcctacggcttacgggcgaagtgtaggccggataaggcgttcacgccgcatccggcagtcgtgctattatcaacgcatattcagtttattggcgtggtaggcaatatgctcgccaataaaactggagacaaaataatagctgtgatcataaccctcgtgataacggattaacgtcttgatattcatctcctggcagatcttttcaagatttggagtccgcagctgttctgcgtaaaaatcatcactcaacccctgatcaaccatgatttccgcaacgcgttgaccttgactaataagactcaccgggtcgtaatccaaccaggcatctttattttcagcaagatatgcagcaaaggcttgctgtccccacggcacttggcttggggagacaatggggctaaacgcgctgacgctgacatattcatctgggttacgtaacgccagcaccagcgcgcccagcccgcccatagaatgaccagagatagactttttggccgttgccggaaaatgatgcatcactaaatccggcagctcgttgcggatatagtcatacattttgtaatgttcattccacggcgcttgcgtcgcgttcaggtaaaacccggcaccttgcccgagatcgtaacggtcagcatctgcgacatgactgcctcgcggactggtgtccggcgcaacaacaataatgttgtgctcagccgcgtaacgctgcatcccgcttttagtaatgaaattctgctcgttgcaggtcaggccactaagccagtacagcaccggcaatttttcattcgcggcttttggtgggagatagacgccgacattcatttcacatttcagactttgggaataatgccgatacatattttgccagccgccaaagctgacatgtttttcaatgagttccatcagtcattatctcagggttaatcccccggacggctgcccggggagagtattaagaacccccgcctgaagtggacggggtaaacctgcgggaaatcagtaacgaattacggttcgaatggatttgccttcatgcatcaggtcgaaggcgtcattaatttcatccaggctcatggtatgcgtgacaaacggttccagatcgatatcacctttcatcgcatcttcaaccatgcccggtaactgggaacgacctttcacgccgccaaacgcggaacctttccatacgcgaccagtgaccaactggaatggacgggtggagatttcctgaccggcaaccgcgaccccgatgatcacgctctgaccccagccgcggtgcgcactttccagcgccgcacgcatcacgttgacgttaccgatgcattcaaaggtatggtcgataccccatttgttgatatccaacaggacatcttttatcggtttgtcgtagtcattcgggttaatgcagtcggtagcaccgaagcgacgcgccagatcgaatttcttcgggttggtatcgatagcgataatccgacccgctttcgcctgacgcgcgccctgaaccactgccagaccaatcgcgccaagaccaaacacggcaacagaatcacctggctggactttagctgtgttgtgtaccgcgccaataccggtggtcacgccacagcccagcaggcagacgtgttcatggtttgcttctggattaatttttgccagagacacttccgcgactacggtgtattcactgaatgtagagcaccccatgtagtgataaagcggctgcccgttgtaagaaaaacgggtggtgccgtctggcatcaggcctttaccctgggtttcgcgaaccgcaacacagaggttagttttgccagaacgacagaactcacactcgccgcactccgcggtgtaaagcgggatcacatggtcgccaggtttgacgctggttacgccttcaccgacttcaaccacaacgccggccccttcgtgaccgagaaccaccgggaatacaccttccgggtcatcgccggagagggtaaatgcgtcggtatggcaaacgccggtatgggtgactttaattagcacttcaccttttttcggtggtgcaacgtcaatttcaacgatttccagcggtttaccgggagcaaatgcaacggcagcacgacttttcatctctcgctcttcctcaatatggtaatagattcagttatttaagataggcacgaaccagttcaatagtgtcgtcaacggattggctgacttcgcggctgtagcagtcatttcggtcaaacgtttcccggatatggctttcaagcacttctgccatcagcccattagccgcgccccgaacggcagcgatctgttggagtatggcacggcattcggcatcaccctccaggctccgttccagagcatcaatctgcccccgaatacgacgaactcgagtaaggacctttttcttctcttccggagtactgggcatttcgcacctcatcatctgcatgcaatatactataggggggtattctatatgtcaatgcatacccccctatagtatataacactggagaataaaatttatccggtgaatgtggtcggaaaacaaagaggaaaggggggggggctaatcggcagggaaggccgccccggatagcgggcggcagaaggaatcagaatttccaggtcagacgggctgcaagttgcagaccgttacgagatggacggtcccctcgcccccttggggagagggttagggtgagggggcgttcaccgtactttcaacaggttaactccccctttctgagaggaaacaaaattaacgcagaatcttcttctcagccaaatccagcgcaaagtagctgaaaatcagatccgcacccgcacgcttaatgctacctaagctttcgagcacgactttctcttcatctatagcacccgccagcgcggcgaacttaatcatcgcatactcaccgctcacctgatacgcgccaatcggcaattcagtacgttcacgcagctcacgcacgatgtcgaggtacgctccagcaggtttaaccatcaggcagtctgcgccctgggcttcatccagcagactttcacgaatcgcctcacgacggttcattgggttcatctgatagcttttgcggtcgccttttaatgcgcttccggcagcttcacggaacgggccataaaaggaggaggcgaacttggtgctatagctcataatcgccgtatctttaaatcccgcagcgtccagcgcctgacgaatcgcctgtacctggccgtccatcgcggcggaaggggcgatgaagtctgcacctgcagcagctgcaaccacggcttgcttgcctaaattttccagagtcgcgtcgttgtcgacgccatgctcgcacagcacaccgcagtgaccgtgagaagtgtattcacagaagcaggtgtcactcataacgatcatttctggcacggtctgcttgcagatgcggctcatacgcgccaccagtccatcttcccgccaggcatcgctgccggtttcatcggtatggtgagagatgccaaaagtcatcacggaacgaataccggcgttggcgatgcgttcaatttcgcgtgccagatgtttctctggaatgcgcatcacgcctggcatggcttcaacggctttgtagtcgtcaatttcttcttcaacaaagatcggcaacaccaggtcgttaaggctaagtgttgtctcttcaaacatagcgcgcagcgcaggagatttgcgcaggcgacgagggcgttggattaagtctgtcatggtctgcctgatgtttgtggaatcgaggggcatagtatacctgaagcagggtagggatgttttacgaaagttgtcgcgatgttgacaagaagagaatggaagagaggccaggacatctttttaatagaaacagcaataattttatattcactgaaaatatttttaatcttgaatattatcgggcgttaaaatattacattgtggttttcaatgcgttatccgcagcgtgacgctccagcgccagttcaatcaaacgtgtgatcagatcggtgtaacccagaccgctggcttgccacagcttcggatacatactgatattagtgaagccaggcagggtgttgatctcgttgatcaccacttcgttctctggggttaaaaacacgtctacacgcgccatgcctgcgcatcccaacgtttgataagcctgaacggcaatcgcccggatcttatcgttgatttctggcgcaatggctgccggaactaccactttcgcgccatcttcgtcaatgtacttggtgtcgtaggcatagaaatcgctggtgagtacgatctctccacaggtgctggcttgcggattgtcgttgcccagaactgcgcattcgatctcacgacctttgatcccttgctcaacgatcactttatgatcgaactcgaacgccagatcgacggcaattgcgtactgttcttcactggttactttgctgacaccaacagaagagccctgattagccggttttacaaacagtggtaaccccagtttagactccacttcggcaaaactaatgttgtgacgattggcgcgcgtcagggtaataaatggcgcaatgttcagcccggcatcgcgtagcagacgtttggtgacatctttgtccatacaggctgcactagccagaacatcagaacctacaaacggtaaattggcgacccgcagcattccctgcaaggaaccatcttcgcccagcgtaccgtggacaatcgggaaaatgacatccaccgtcggcaacggctgaccgttttgcgcgtcgataagctgatgctcatgtttacctggcacctgcgcaaggctggtcgcgctagggcgcaacgcaatatgggcaggatcgtctgcatttagcagataattgctggcatcgctgacgtgccattgcccttgtttatcaatgcccagcagcacaacgtcgaagcgacttttatcaatggcatcgacaatgttttttgcgctttgcagagacacttcatgttccgcacttttaccaccaaaaacgattcctacccgcagtttttccatcttaaaaacctatcccgtctaacacaaagtgcatacattaccacgacaaaacgggggattcgcggccttctgaaagattgttgcaatcttctgctgacaaagcgtgcaacgtactggtgaagaaagtgcgttatctcaaagatgtgcgcaagatcacaaaaatgatgaacgggaagctaatttattcctggcttaaatggccatgcggtgagtttttttctcttaattataagttaacgaagagaatatatttcataacttttatttataataaaggttgataattaaaagcctatattttgtgtgggtaattatttaaataagagaaacgtttcgctggtaatcaaacaaaaaatatttgcgcaaagtatttcctttgtcataaaaataatacttccagacactatgaagttgtgaaacataatgttaacttctccatactttggataaggaaatacagacatgaaaaatctcattgctgagttgttatttaagcttgcccaaaaagaagaagagagcaaagaactgtgtgcgcaggtagaagctttggagattatcgtcactgcaatgcttcgcaatatggcgcaaaatgaccaacagcggttgattgatcaggtagagggggcgctgtacgaggtaaagcccgatgccagcattcctgacgacgatacggagctgctgcgcgattacgtaaagaagttattgaagcatcctcgtcagtaaaaagttaatcttttcaacagctgtcataaagttgtcacggccgagacttatagtcgctttgtttttattttttaatgtatttgtacatggagaaaataaagtgaaacaaagcactattgcactggcactcttaccgttactgtttacccctgtgacaaaagcccggacaccagaaatgcctgttctggaaaaccgggctgctcagggcgatattactgcacccggcggtgctcgccgtttaacgggtgatcagactgccgctctgcgtgattctcttagcgataaacctgcaaaaaatattattttgctgattggcgatgggatgggggacagcgaaattactgccgcacgtaattatgccgaaggtgcgggcggcttttttaaaggtatagatgccttaccgcttaccgggcaatacactcactatgcgctgaataaaaaaaccggcaaaccggactacgtcaccgacagcgctgcaagtgcaaccgcctggagtaccggtgtcaaaacctataacggcgcgctgggcgtcgatattcacgaaaaagatcacccaacgattctggaaatggcaaaagccgcaggtctggcgaccggtaacgtttctaccgcagagttgcaggatgccacgcccgctgcgctggtggcacatgtgaccagccgcaaatgctacggtccgagcgcgaccagtgaaaaatgtccgggtaacgctctggaaaaaggcggaaaaggaagcattaccgaacagctgcttaacgctcgtgccgacgttacgcttggcggcggcgcaaaaacctttgctgaaacggcaaccgctggtgaatggcagggaaaaacgctgcgtgaacaggcacaggcgcgtggttatcagttggtgagcgatgctgccagtctgaatagcgtgacggaagcgaatcagcaaaaacccctgcttggcctgtttgctgacggcaatatgccagtgcgctggctaggaccgaaagcaacgtaccatggcaatatcgataagcccgcagtcacctgtacgccaaatccgcaacgtaatgacagtgtaccaaccctggcgcagatgaccgacaaagccattgaattgttgagtaaaaatgagaaaggctttttcctgcaagttgaaggtgcgagtatcgataaacaggatcatgctgcgaatccttgtgggcaaattggcgagacggtcgatctcgatgaagccgtacaacgggcgctggaattcgctaaaaaggagggtaacacgctggtcatagtcaccgctgatcacgcccacgccagccagattgttgcgccggataccaaagctccgggcctcacccaggcgctaaataccaaagatggcgcagtgatggtgatgagttacgggaactccgaagaggatagtcaagaacataccggcagtcagttgcgtattgcggcgtatggcccgcatgccgccaatgttgttggactgaccgaccagaccgatctcttctacaccatgaaagccgctctggggctgaaataaaaccgcgcccggcagtgaattttcgctgccgggtggtttttttgctgttagcaaccagacttaatggcagatcacgggcgcatacgctcatggttaaaacatgaagagggatggtgctatgaaaataacattactggttaccttgcttttcggtctggtttttttaaccaccgtcggcgctgccgagagaactttaaccccacaacaacagcgtatgacctcctgtaatcagcaggcgacggcgcaggcgttgaaaggggatgctcgtaagacctacatgagtgattgcctgaagaacagcaagtctgcgcctggcgaaaaaagtttgacgccacagcagcaaaagatgcgcgaatgcaataatcaagcaacacaacaatctctgaaaggtgatgatcgtaataagtttatgagtgcctgcctcaagaaagccgcctgatacctgatagtgctaacgggtgagctacgaaaatggctcacccgaaatatcatacttctgcctttagctccgtctctataatttgggaaaattgtttctgaatgttcccaaaaataatgaatgatgaaaactttttcaaaaaagcggcggcgcacggggaggaacctcctttaactcctcaaaacgaacatcagcggtccgggctgcgcttcgcccgtcgcgtcagactaccccgtgcggttggcctggctggcatgttcttaccgattgctagtacgctggttagtcacccgccgccgggctggtggtggctggtgttggtcggctgggcgttcgtctggccgcatttagcctggcagatagcgagcagggccgtcgatccgcttagccgggaaatttacaacttaaaaaccgatgcagtattagcgggaatgtgggtaggcgtaatgggcgtaaacgtgctgccttccaccgcgatgttgatgattatgtgtctgaatttgatgggggcaggcggcccccgtctgtttgtcgcgggtctggtgttgatggtggtttcctgccttgtcaccctcgagctgacgggcattaccgtgagcttcaatagtgcgccgctggaatggtggctctcccttcccattattgtcatttatcctctgctgtttggctgggtcagctaccagacggcaaccaaactggcggaacataaacgcaggttgcaggtcatgagtacccgcgacggcatgacgggcgtgtataaccgacgtcattgggaaactatgttacgcaatgaatttgataactgtcggcggcataatcgcgatgcaacgttactgattatcgatatcgaccatttcaagagcatcaacgatacctggggccatgatgtgggcgatgaagcgattgtggcgcttacccgacagttacaaattaccctgcgcggtagcgatgtgattggtcggtttggcggcgatgagtttgcagtaatcatgtccggtacgccagctgagagcgccattaccgccatgttacgggtgcatgaagggctaaatacattacgtttgccgaatacgccacaggtaactttacggattagtgtgggggttgcgccgctgaacccacaaatgagtcactatcgtgagtggttgaaaagcgcagatttggcgctttacaaagcaaagaaagccggacgtaaccgcaccgaagtggcggcctgacgtccggcgaaagtcatcaggatttgctgagtttttcacttttttccatacacttcgtcatcgcttcgatcactgcagcacggaagcctttctcttccagtacgcgtaccgcttcaatggtggtgcctcccggactgcagaccatatctttcagtgcccccggatgttctcccgtttccagcaccatttttgcggaacccattaccgcctgagcggcaaatttatacgcctgggcgcgtggcatcccgcccagcacggcggcgtcggccatcgcttcgataaacataaatacgtaggctgggctagaaccgctcacaccgaccaccgggtggatcatcggctcagcaattacttccgcttcgccaaagcagcggaaaatattcagcacatcagcggtatcttctggggttaccagcgcgtttggcgttacggaggtcatcccggcattaaccagtgcgggagtgttcggcatggcgcggataattttccggtcatggcccagcgcgcgggcaagctggtcgagcgtgacacctgcagcaatagaaacgaccagagagtctttattcaggctggaggtgatttcgctaagcactttaatcatgatgccaggtttaacggcagcaaaaatgatgtcggcgatttgcgccacttcttgcgcgctttctgcggcgttgatgccgaactggtcatgcagggcggcgactttatccggggagggggtgtatacccagatttgccctggaagcacctgaccgctggcaatcagaccgccgagaatggcttttcccatattgccgcagccaataaaaccgattttcttttccattgcctcactcctgccgtgaaattcattgttttgataatcgctggcagaagcataaacagaactatgccggaaggcaaaagcgcgacacaatagaggattacccaacaaaggatgactttatgacaatttgggtggatgccgacgcgtgtcccaatgtaattaaagagattttgtatcgcgcggcggaacgtatgcagatgccgctggtactggtagcaaaccagagtttacgcgtgccgccaagccgatttattcgtacgctgcgcgtcgcggcaggtttcgacgttgccgataacgaaattgtccggcagtgtgaagcgggcgatttggtgatcaccgcagatatacctttggctgctgaagccatcgagaaaggcgctgcggcgcttaatccgcgcggcgaacgttacacgccagcgaccattcgtgagcgcctgacgatgcgcgattttatggataccttacgtgccagtgggatccagaccggcggaccagatagccttagtcaacgtgaccgccaggcctttgccgcggagctggagaagtggtggctggaagtgcaacgtagtcgtggctaaatgtaatttattatttacacttcattcttgaatatttattggtatagtaaggggtgtattgagattttcactttaagtggaattttttctttacaatcgaaattgtactagtttgatggtatgatcgctattctcatgacaccggctttcgccgcattgcgacctattggggaaaacccacgatgacacaacctctttttctgatcgggcctcggggctgtggtaaaacaacggtcggaatggcccttgccgatagccttaaccgtcggtttgtcgataccgatcagtggttgcaaagtcagctcaatatgacggtcgcggagatcgtcgaaagggaagagtgggcgggatttcgcgccagagaaacggcggcgctggaagcggtaactgcgccatccaccgttatcgctacaggcggcggcattattctgacggaatttaatcgtcacttcatgcaaaataacgggatcgtggtttatttgtgtgcgccagtaagtgtcctggttaaccgactgcaagctgcaccggaagaagatttacggccaaccttaacgggaaaaccgctgagcgaagaagttcaggaagtgctggaagaacgcgatgcgctatatcgcgaagttgcgcatattatcatcgacgcaacaaacgaacccagccaggtgatttctgaaattcgcagcgccctggcacagacgatcaattgttgattttcgagcgcctatacttaacgttcatcccgtgaaataaggaagaacgatgccaacgaaaccgccttatcctcgtgaagcatatatagtgacgattgaaaaaggaaagccaggacagacggtaacctggtaccaactcagagccgatcatcctaaaccagacagcttgatcagtgaacatccgaccgctcaggaagcgatggatgcgaaaaaacgctatgaggaccctgacaaagagtgaccgcatcagactgctcggaagggattctgagtgccactacaagggatctgcgtcacatttttcataattcatgtttttctaataattagaatattaaacaataacaatccattactggaatcatttggaatctttacattatgccgtgcacgtctgctgctacgctttttgtcatttgtagcacaagtaagtgtcagcagtggtgcttcacacttgcccggtaattaacgacgaaagaaaagtaaggtggatgaacaatgagtgcgagcttggcgatcctgaccatcggcattgtacctatgcaggaagttttgccgctcctgacggaatacattgacgaagataatatttcccatcatagcctgctggggaagttaagtcgtgaagaagtgatggcggagtacgcgccagaagcaggcgaagacaccattctcacattattaaatgacaaccagctggcccatgttagccgtcgcaaagtggagcgtgacctgcaaggtgtggttgaagtgctcgataatcagggttatgacgtcattttattaatgagtacagcaaacattagtagtatgactgcgcgtaatacgatctttcttgagccgagccgaatattgcctccactggtttcctctattgttgaagatcatcaggtgggggttatcgttccggttgaggagatgctgcccgttcaggcgcaaaaatggcaaattttgcagaaaagcccggtatttagtttgggtaaccccattcatgatagtgaacaaaaaatcattgatgccgggaaagaattactggcaaaaggggctgatgtcatcatgctggattgtttaggatttcaccaacgtcatcgcgatttactgcaaaaacagctcgatgttcctgtcttgctgtctaacgtattgattgcacggctggctgcggaattactggtgtaattttgcgtgacagccagcgcctctggcccctatagtgaagtagatgttcaactaccaaacagggccagtttatgcttcaaagtaatgagtacttttccggcaaagtgaaaagtatcggcttttccagcagcagcactggtcgcgccagcgtgggtgttatggttgaaggcgaatacaccttcagcaccgctgagccggaagagatgacggtaatcagtggcgcgctgaatgtgttactgcctgacgcgaccgactggcaggtgtatgaagccggtagcgtgtttaatgttcccggtcacagtgagtttcatctgcaagttgccgaacccacctcttatctgtgccgctatctgtaattcctcgccttccccttgaacgggagggcatttttctgaaatatcctttctttagcccataataatatttcctttgctgcgattttttcaatttccgatatattcataatttatcaaggttgatataaatatcagtgaagatctccagatattgttgcggaactggctacgataaaagataaatcagatgatgaatggtggcgtgcattgctgcaaagtcgcaatgatcatttacgccaaacggcattgcgcaacgcacataccccggcgttgttgttaacgacattgactgagcctcaggatcggagcctggctattaataatccacagctggctgccgatgtgaaaacggcgtggttaaaagaggatccaagtttactcttatttgtcgaacaacccgatcttagcctgttacgtgatttagtgaaaaccggggcaacgcggaaaattcgcagtgaagcgcgtcaccggcttgaggaaaaacaatgacacaacgtccatggagcaagttacagcgtaaaacgcataatattgctgcgctaaaaattattgctcgccgtagcgaataattatatgcctggtgtggcttcgtacgccggataagacgcggcaggcgtcgcatccggcattaaaggaaaatcagcaattaacgttgtgcttcgccacctaatccttcaatcaggttttgaattaacgctgccagttcaccagtcatcaggatgaaatcggcatcaaaacgctgggcgaaatcttcacggtcgatatcttcgttttgatcgcgcagctcgtcgcagaacttcagacgcttgaggctaccatcgtcgcacatcacaaactgaatgcgctgctgccagtcgagcgccagtttagtcaccacttttccggcttcaatgtgattggtgatctcttcgctggtcagatcttgtttcttcgcgcggatcacgccgccatcttccagcaagcttttcagctcggcttcatcaagcagctggaagccctgtgccgcactaccggagcgaacccattcggtcagcgtcagttcaatcgggttttccatgctcaatggtacaaccggtaagctccccaggcttttacgcagtaatgccagcgtatcttccgcttttttggcactggcgcagtccaccataatcaaaccgttaaccgtgtcgatccacatcattgtctggctaaaacggctgaaagcacgcggcagcagagagtgcagcacttcgtctttcaggctatctttttcggttttcttcagcttacgcgcctgttccgcttccagtttggcgattttcgcttccagcgcctgtttaatcaccggagacgggaggattttttcttctttgcgcgcgcagataacaatttgaccattggcaacgtgcgttaacgcatcgctgtggcttcccatcggaggaacccagcccatcttcgccatgtcctggctgccgcatggggtaaatgccatgctggctagctgtttttccatctcttctgcacgcaggctaatctcgcggctaagacggtaaaccattaaatttttgaaccacagcatgataatttccacggccttgtcgttaaatttagcgggcatgataacgaattgtcggcggccttgcattgccaatccggttgtccgtctctacgctattgatattgaaaaaaataaggagagtaccgtgcgtataggtatcgatttaggcggcaccaaaactgaagtgattgcactgggcgatgcaggggagcagttgtaccgccatcgtctgcccacgccgcgtgatgattaccggcagactattgaaacgatcgccacgttggttgatatggcggagcaggcgacggggcagcgcggaacggtaggtatgggcattcctggcagtattagcccttacaccggtgtggtgaagaatgccaatagtacctggctcaacggtcagccattcgataaagacttaagcgcgaggttgcagcgggaagtgcggctggcaaatgacgctaactgtctggcggttagtgaagcagtagatggcgcggcagcgggagcgcagacggtatttgccgtgattatcggcacgggatgcggcgcgggcgtggcattcaatgggcgggcgcatatcggcggcaatggcacggcaggtgagtggggacacaatccgctaccgtggatggacgaagacgaactgcgttatcgcgaggaagtcccttgttattgcggtaaacaaggttgtattgaaacctttattagcggcacgggattcgcgatggattatcgtcgtttgagcggacatgcgctgaaaggcagtgaaattatccgcctggttgaagaaagcgatccggtagcggaactggcattgcgtcgctacgagctgcggctggcaaaaagcctggcacatgtcgtgaatattctcgatccggatgtgattgtcctggggggcgggatgagcaatgtagaccgtttatatcaaacggttgggcagttgattaaacaatttgtcttcggcggcgaatgtgaaacgccggtgcgtaaggcgaagcacggtgattccagcggcgtacgcggcgctgcgtggttatggccacaagagtaaaaaacgtaggcaattggcgcatcatgcctgatgcgacgcttgccgcgtcttatcaggcctacaaaaggtgccagaaccgtaggccggataaggcgttcacgccgcatccggcaataagtgctccgatgcctgatgcgacgcttgccgcgtcttatcaggcctgcaaaatgtgccagaaccgcgtagggcggataaggcgttcacgccgcatccggcaataagtaatgagcaccgagactataacttaccccagtggtttcgccagcaccggagtatccgccgcttgctggcgcttatagcgaccatacagcagcaagctgctcatcgcagcaaagctaagcagggcggcaggcagcgccacgtaattatatgccagccccagcgtcagcatcatacctccgcaatatgcgccgacggcgctaccgaggttaaacgctatttgcccacctgcggcacctaataactctccgcctttggcgttttgtagtaacaatatttgtagcggtgcactaagggcaaataatcccgcgcaacaaataaaagcaaaaataaggctcgttgttttcatgccgccgcagaaaaagagcatcagcagtgccagtacaattataaagtcagttactgctgcaatgcgcagtggactataacgtccactaatcctgccacttagcatatttcccagcaccatccctagcccaactaacatcataataaaggtcatcgccgtttcgctaaaaccggaaataaacatcatgtatggctttacgtagctgaaccaggcaaacacacctgcgttgccaaacatcgtggcggcgaaaattaaccacggggccgggctgcgcaaaaagtgaaattgttcgcgcagatttcctttcgcctcgtcgcgaatatctggcacccaaaaatagacgcttgccatcaccgcaatattaaaaacagcgatcaataaaaaggtgtaacgccagctaaattcctgacttaaatacgttcccagcggaatgcccagcaaattggcgactgtcatcccggaaaccatccccgccacggcggcggtgacttttccgggtttgataattttacttaacacgatcgctccgacgccaaaaaatgcgccatgcggaaagccggataccagccgaccaatggcgagcatcaggtaagagctagagagcgtgaacatggcgttgccaatgacgcacaacgccaccagaaacaacaagatatgtttgagactgtagcggctggaaaagagtgcgatgattggcgcaccgaccaccacccccagtgcataatagctgatcatatgcccggcggcaggaatgctaattcctacgttatgcgccagctccgtgagcacgcccataatgccaaattcggccatccccaaaccaaacgtgcccagagccaaagataaaatgacttttttcataccaccatcacaaccaccagaacggctaccaatcaccgtagccaataaagtgatagcttgcaggataacgaccagcaaggccaagagataattcgcccctctgtattcattatcctgctgaatagttatttcactgcaaacgtactttccagtttgctgtagcccaggccgttgatctttttcactttgatctgcaccggaatacgctctttcatcgcttctacgtggctaatcacaccgatggttttgccactggcgttcagggcatccagcgcatcaagggcggtatccagcgtttcgctatccagcgtgccaaaaccttcatcaaggaacaggctgtcaatacgtgttttatggctgaccagatcgctaagcgccagcgccagcgccagactaacgaggaaactttcgccgccggaaagggtacgggtatcgcgtaccgcatctgcctgccaggtatcaacaacctcgacttccagcgcctcgctggctttgcgctgtaacagatagcgcccgtgcagccgggtaagttgctgattagcgagatggactaaattatccagcgtcagcccctgggcaaacttgcggaatttatcgccctctttggaacctattaggctattcagatatccccagtcctcaacctgctgcgtcatttgagcaatttgctgcattaaggtttgttgttgctgacggttatctgcatcctgcttcagctgctggcgaatctcgccttgactcgtggtgttttcacgcaacttttggtgagtttgcgctaactcttgctgaatctgctccaccgtcacagtgagagccaacccgtcgtcaggtcggtgttgttgatgctgtgccagcgtttctgctgtctgagtgaccagagtttgcgcctgacggcgctggttttccagattctgcttgagctgttccagctgcgttagtgtttgttcatccattagcgccgcaaggaacgcctgctgatcgtcaaagacgctggcctgtagcgcggtgtcaaactgcgcctgggctttttgcagactttgcgccgccagaacatcctgttgctgtaacgtctgctgctggctgtgtaatgcgagacattgttcatgtacctgccgccagttttccaataccacagtttcttcgcagtgcgggagttcatcactttgcggcaacgtttccagaatcggcgtcagctgctgaatacggttttgcagcgcggttaattcgttctggcgttgctgccagctctgcgcttcttgctgacgtgtcgccaaccagctctcttcttcatcttcctgtggcaatgtcagtgcataacccgtcaatgtcgttaaaagtagttgctggcgttgttcaatttgctgttgatactggataatttgctgattatgcgcggcaatctgcccttgtaattcatgccgttggctgagtaaccgcagctggcgttcgtgctcatcttgtgcatccagccacggttgaatatcgtccagtggctgcaaggtgatattgaggctggccgtgacggcttgccattgttgagtaagtgcttgctcatcttgtcggaggctttgcgcttcgttttcatcacgctgaagctgctttgttatggcgtccagttgcccacgtagcgtcgcaccttcttcaccgagctttttaacttcgttttccagcgccagtaatcgagactgattaacgccaggctccagcgcctgatacgcctcgaccgccgggtggctggtggaaccacaaagtgggcaaggctgacccgcctgtaactgtgcacgttgagcttccagcgttttgatgcgcgcttcctgctcgcaaatggttttcacatcggcaagttgctgcgtcttttctttataacgctggcgcatttcgttaagtgcggcgttacgttgcgtctgttcttgcgtgacattctggatagcgacctgtaactgcgccagacgtttttgttggggaacaatctgtccatgcagcgcgaccaggtgctgacgcagtgggcgttgctcagcatgttgcgccagggcggtagcaacttcatcggcggttaacgtcaacgtgatcgccgcaagcgcattaagtttttgctcagcatgggttaactgttgctgccattgccgcagatgctcgcgatcgctggtttgttgggagaactgcgcacgccaacccgccggttcgttgttccactgacggaagcggtcgtgttcctgtaaccaggtattcaggctttgttgctgctgctgtaattctgcactctgcttcgccgcgtggtggcgaatgctcgcgcgaagcgccattgtgctctgtaagcgagtatttacttcttcaatctgctggcgaatatgcgccagcgccgcgctgtgttctgcgatgcgttcccagtgtggacgaagatttcgtgccggttgtgccagactaagcgccgccagttgaggttgcgctttttcttcttcggctaacgcctgttgcaaggcctgctgacggcggctggcttcttgctgcaattcgtcctgacgcgttaaccagtttaggctttgttgttcttgctgctgcgcggtaattaactgtttttcttcgtcagtaagtacctgcaaactcgctgtcaggctttgcacttgttccggcgtgagcaacgtgacgccgctggcctgcgcttgcagcttctccagctctgtgcgggcgcttttgtgctgctcaaaaaccatcgcgctgatttgcccgtagatttcagtgccggttaactcctcgagcaattccgcgcgttctttgggtttggcattcaggaaggcagcaaattgcccctggctaagcagcatgctacgggtgaagcgcccgtaatccagcccggttaacgtcgctgtcagttccagcttatctttcactttgtcggcgagaattttgccgtcggcgcagcgcgccagctctacgcgtggcacctgcaaattaccgtcgggttggttacgcgcccgattctggctccagaatgcacggtacgcttcacctttcacttcaaactccacctccgccagacattcggcggtatcgcgggtcatgagatcattttggctttgactaacgttagagagacgcggagtttcgtgatacagcgccagacaaatggcgtccagcagggtggttttccccgcacctgttgggccggtaatagcaaacagcccgttgctggcgaacggctcgcgggtgaaatcaatcttccattcgccttttaaactgttcaggtttttcaggcgcaggctgagaattttcatgcttcgtgttctccggcgagggtatgcaacgtcgtggtgaaaagatgctgcagacgttgctgctggctttcatccagttcttccagtgccagacggcgattgaacacctcttcgacgctgagttcgctgagggtttcacgctgttggctggctaacacacgctcgcgctgttcacgactccgacgtaccagcaatacttcgacaggcaaactttcggttaatgcctggattttgcgctgaatatcatgcagatactcatcagtagtgatttcgatatccagccagacaggtggctcctggcttacatcgcgccactgttccagctgtgcggtaatgctcgccagatcgcctttcagcactgccatgggttgcgttaccggtacgttcaggttttccacgctctctaatttgccgttactaaatgtcaccagatggacatatttactcttaccgcattcatcaaaactcagtggaatgggggagccgcaatagcgaacatgttccatgccgccaataatctgtgcgcggtgaatatgcccgagcgcgatgtagtcggctggtggaaagttttgtgccggaaacgcgtccagcgtgccaatataaatgtcacgcacggcgtcacttttactggcccccacggtcgttaaatgtcccgtggcgatgatgggcagaggctgatcgccgcgcagtttgcaggcatcggcatagtgttgttggtaataatcggtaatcgctgccagtaaatgctgctgtttttcaataccgttaagccccgcctggctggtaataatgtcacgcggacgtaaaaacggaatggggcacagcactgcgcctggcgtcccgtcgcgacgaggcaagatttgcggcgcatgtccggcgctggcgaccacggtagtattgaggaacgccatgatatcgcggctttcattcagcgtggcgacgctgtcatggtttcctgccagtaccaccagatgacagccagtttgctgtaaattgacaacaaaacggttgtataacgtgcgggcgtaactgggcgggctgccggtatcgaaaacatcaccggcaacaataatcgcatccacctgatgggtttgtgctgtctccagcagccagtcaagaaaagcctgatgttcagcttcgcggcttttactgtagaagttctggccgagatgccagtcactggtgtgaaggatgcgcataacggttccctggcgaaaaagcatgggcgcgattatacccaaacagatgtgccatttgcttttttctgcgccacggaaatcaataacctgaagatatgtgcgacgagcttttcataaatctgtcataaatctgacgcataatgacgtcgcattaatgatcgcaacctatttattacaacagggcaaatcatggcgagacgtattctggtcgtagaagatgaagctccaattcgcgaaatggtctgcttcgtgctcgaacaaaatggctttcagccggtcgaagcggaagattatgacagtgctgtgaatcaactgaatgaaccctggccggatttaattctcctcgactggatgttacctggcggctccggtatccagttcatcaaacacctcaagcgcgagagcatgacccgggatattccagtggtgatgttgaccgccagaggggaagaagaagatcgcgtgcgcggccttgaaaccggcgcggatgactatatcaccaagccgtttagcccgaaggagctggtggcgcgaatcaaagcggtaatgcgccgtattagcccaatggcggtggaagaggtgattgagatgcagggattaagtctcgacccgacatctcaccgagtgatggcgggcgaagagccgctggagatggggccgacagaatttaaactgctgcacttttttatgacgcatcctgagcgcgtgtacagccgcgagcagctgttaaaccacgtctggggaactaacgtgtatgtggaagaccgcacggtcgatgtccacattcgtcgcctgcgtaaagcactggagcccggcgggcatgaccgcatggtgcagaccgtgcgcggtacaggatatcgttttagtacccgcttttaacgccttgctcatcggacgcagagcagggcttatgatttcttaactggagtatcttacgtgctggaacggctgagctggaaaaggctggtgctggagctgctactttgctgcctcccggctttcatcctgggtgcattttttggttacctgccctggtttttgctggcaagcgtaacaggactgcttatctggcatttctggaatttattgcgccttagttggtggctgtgggtggatcgcagtatgaccccgccaccggggcgtggtagctgggaaccgctactatacggcttacaccagatgcagctgcgaaataaaaaacgccgccgtgaactgggcaatctgattaaacgctttcgtagcggcgcggagagcctgcccgacgcggtggtgctgaccacggaagagggcggtattttctggtgtaacggtctggcgcaacaaattcttggtttgcgctggccggaagataacgggcagaacatccttaacctactgcgttacccggagtttacgcaatatctgaaaacgcgtgatttttctcgcccgctcaatctggtgctcaacaccgggcggcatctggaaattcgcgtcatgccttatacccacaaacagttgctgatggtggcgcgtgatgtcacgcaaatgcatcaactggaaggggcgcggcgtaacttttttgccaacgtgagccatgagttacgtacgccattgaccgtgttacagggttacctggagatgatgaatgagcagccgctggaaggcgcggtacgcgaaaaagcgttgcacaccatgcgcgagcagacccagcggatggaaggactggtgaagcaattgctgacgctgagcaaaatagaagccgcaccgacgcatttgctcaatgaaaaggttgatgtgccgatgatgctgcgcgttgttgagcgcgaggctcagactctgagtcagaaaaaacagacatttacctttgagatagataacggcctcaaggtgtctggcaacgaagatcagctacgcagtgcgattagcaacctggtctataacgccgtgaatcatacgccggaaggcacgcatatcaccgtacgctggcagcgagtgccgcacggtgccgaatttagcgttgaagataacggaccgggcattgcaccggagcatattccgcgcctgaccgagcgtttttatcgcgttgataaagcgcgttcccggcaaaccggcggtagcggattagggttagcgatcgtgaaacatgctgtgaatcatcacgaaagtcgcctgaatattgagagtacagtaggaaaaggaacacgtttcagttttgttatcccggaacgtttaattgccaaaaacagcgattaatccgcctttgtcatcttttattgccataagccagtcgatgctggcttattttctttgcagtcaaaatacgggcgttagattttacaacgattggtgattttttgttcgcatgattagccatgtctttttcacggaaatagtgttttatactggttggtgatttcttatcgctatatacctctggtttttagatccctccttgctttaaaacgttataagcgtttaaattgcgcttcaggtgctgtcatactgactgcattaacgcggtaaatcgaaaaactattcttcgccgcgcctggttgggagtatttcccgctaaaattgtttaaatataccgctgtatcatccccagggattggcacaaaaatttaacgttacaacaccacatccacaggcagtatgatttatgacccatcaattaagaagccgcgatatcatcgctctgggctttatgacatttgcgttgttcgtcggcgcaggtaacattattttccctccaatggtcggcttacaggcaggcgaacacgtctggactgcggcattcggcttcctcattactgccgttggcctgccggtattaacggtagtggcgctggcaaaagttggcggcggtgttgacagcctcagcacgccaatcggtaaagtcgctggcgtactgctggcaacggtttgttacctggcggtggggccgcttttcgctacgccgcgtacagctaccgtttcctttgaagtggggattgcgccgctgacgggtgattccgcgctgccgctgtttatctacagcctggtctatttcgctatcgttattctggttagcctctatccgggcaagctgctggataccgtgggcaacttccttgcgccgctgaaaattatcgcgctggtcatcctgtctgttgccgctattgtctggccggcgggttctatcagcacggcgactgaggcttatcaaaacgctgcgttttctaacggcttcgttaacggctatctgaccatggatacgctgggcgcaatggtgtttggtatcgttattgttaacgcggcgcgttctcgtggcgttaccgaagcgcgtctgctgacccgttataccgtctgggctggcctgatggcgggtgttggtctgactctgctgtacctggcgctgttccgtctggggagtgacagcgcgagcctggtcgatcagtctgcaaacggcgctgctattctgcatgcttacgttcagcacacctttggcggcggcggtagcttcctgctggcggcgttaatcttcatcgcctgcctggtaacggcagttggcctgacctgtgcttgtgcagaattctttgcccagtacgtaccgctctcttatcgtacgctggtgtttatcctcggcggcttcagcatggtggtttctaacctcggcttaagccagctgatccagatctccgtaccggtgctgaccgctatttatccgccgtgtatcgcactggttgtattaagttttacacgcagttggtggcataatagctcccgcgtgattgctccgccgatgtttatcagcctgctttttggtattctcgacgggatcaaagcatctgcattcagcgatatcttaccgtcctgggcgcagcgtttaccgctggccgaacaaggtctggcgtggttaatgccaacagtggtgatggtggttctggccattatctgggatcgcgcggcaggtcgtcaggtgacctccagcgctcactaaatcactgaacatttgttttaaccacggggctgcgatgccccgtggttttttattgtgttgatgggttaggaattgatggaaagtaagaacaagctaaagcgtgggctaagtacccgccacatacgctttatggcactgggtagtgcaattggcaccgggctgttttacggtagcgcagacgccatcaaaatggccggtccgagcgtgttgttggcctatattatcggtggtatcgcggcgtatatcattatgcgtgcgctgggggaaatgagcgtacataacccggccgccagctctttcagccgttatgcgcaggaaaacctcggcccgctggcaggttacattaccggctggacctactgctttgaaatccttattgtcgccatcgccgatgtgaccgcttttggtatctatatgggtgtctggttcccgacggtgccgcactggatttgggtactgagcgtggtgctgatcatttgcgccgtaaacctgatgagcgtgaaggtattcggtgagctggaattctggttcagcttctttaaagtcgccaccatcatcatcatgattgtcgccggtttcggcatcatcatctgggggattggcaacggcgggcaaccgaccggtattcataacctgtggagcaacggcggcttcttcagtaacggctggcttggcatggtaatgagcttgcaaatggtgatgtttgcttacggtgggatcgaaattatcgggattaccgccggtgaagcgaaagatcctgagaaaagcataccgcgtgcgattaactccgtgccgatgcgtattctggtgttctacgtcggtacgctgttcgtcattatgtctatctacccgtggaatcaggttggcactgccggtagcccgttcgtgctgacgttccagcatatgggcattacctttgccgccagcattcttaactttgttgtgctgactgctagcctgagcgcaattaacagtgatgtatttggcgtaggccgtatgctccacggtatggcagagcagggcagcgcgccgaaaattttcagcaaaacgagccgtcgcggtattccgtgggttacggtgctggtgatgactaccgcgctgctgtttgcggtgtatctgaactacatcatgccggaaaacgtcttcctggtgatcgctagcctggcaaccttcgccacggtgtgggtgtggattatgatcctgctgagccaaattgccttccgtcgccgtttgccgccagaagaagttaaggcgctgaaatttaaagtgccgggtggggtagcaacgaccatcggcgggctgattttcctgctctttattatcgggttgattggttatcacccggatacgcgtatcagcctgtatgtcggtttcgcgtggattgttgtgctgttgattggctggatgtttaaacgccgccacgatcgtcagctggctgaaaaccagtaatccttgcgttctgtaagccggttcaggaggaaatcctgatccggctattccgaaagttatccgcccccgtcctcctcccccaaatatccttcagatgatgagtgatcctgcattaggctatggcaaggtgatcagattttcatcacaggggaattatgatgttaaatgcatggcacctgccggtgcccccatttgttaaacaaagcaaagatcaactgctcattacactgtggctgacgggcgaagacccaccgcagcgcattatgctgcgtacagaacacgataacgaagaaatgagtgtaccgatgcataagcagcgcagtcagccgcagcctggcgtcaccgcatggcgtgcggcgattgatctctccagcggacaaccccggcggcgttacagtttcaaactgctgtggcacgatcgccagcgttggtttacaccgcagggcttcagccgaatgccgccggcacgactggagcagtttgccgtcgatgtaccggatatcggcccacaatgggctgcggatcagattttttatcagatcttccctgatcgttttgcgcgtagtcttcctcgtgaagctgaacaggatcatgtctattaccatcatgcagccggacaagagatcatcttgcgtgactgggatgaaccggtcacggcgcaggcgggcggaagtacgttctatggcggcgatctggacgggataagcgaaaaactgccgtatctgaaaaagcttggcgtgacagcgctgtatctcaatccggtgtttaaagctcccagcgtacataaatacgataccgaggattatcgccatgtcgatccgcagtttggcggtgatggggcgttgctgcgtttgcgacacaatacgcagcagctgggaatgcggctggtgctggacggcgtgtttaaccacagtggcgattcccatgcctggtttgacaggcataatcgtggcacgggtggtgcttgtcacaaccccgaaagcccctggcgcgactggtacagctttagtgatgatggcacggcgctcgactggcttggctatgccagcttgccgaagctggattatcagagcgaaagtctggtgaatgaaatttatcgcggggaagacagtattgtccgccactggctgaaagcgccgtggaatatggacggctggcggctggatgtggtgcatatgctgggggaggcgggtggggcgcgcaataatatgcagcacgttgccgggatcaccgaagcggcgaaagaaacccagccggaagcgtatattgtcggcgaacattttggcgatgcacggcaatggttacaggccgatgtggaagatgccgccatgaactatcgtggcttcacattcccgttgtggggatttcttgccaataccgatatctcttacgatccgcagcaaattgatgcccaaacctgtatggcctggatggataattaccgcgcagggctttctcatcaacaacaattacgtatgtttaatcagctcgacagccacgatactgcgcgatttaaaacgctgctcggtcgggatattgcgcgcctgccgctggcggtggtctggctgttcacctggcctggtgtaccgtgcatttattacggtgatgaagtaggactggatggcaaaaacgatccgttttgccgtaaaccgttcccctggcaggtggaaaagcaggatacggcgttattcgcgctgtaccagcgaatgattgcgctgcgtaagaaaagtcaggcgctacgtcatggcggctgtcaggtgctgtatgcggaagataacgtggtggtatttgtccgcgtgctgaatcagcaacgtgtactggtggcaatcaaccgtggcgaggcctgtgaagtggtgctacccgcgagtccgtttctcaatgccgtgcaatggcaatgcaaagaagggcatgggcaactgactgacgggattctggctttgcctgccattagcgctacggtatggatgaactaacgttttataacgccttgcgactcgcctgcgccatcatccgcggataaaactgccagaagcgggtttcgagggcgtcataatgagcgtctaaatcgtaccaggagtcacgcagggcatccagacgtgggcggcggcttgccatgccgtttaacacgttctggatgaaatccatatcgcgatagcgcaccagccactgctcactccacaagtaattgttcagattgataaaacgtggcggactgtccggcaaaatcgtcatcacttgctcgcgggcataacagacaaattcctgtagcggaaagtccgggctcagctggctccagtggcgggaaagaaagtgatcccacatgacatccagcgtaataggcgcaacgcggcgcgtttcactacgaaaccactcccgtgcttcgcggacttccggcagattgtcagtcaatacgtcgatacgtcgatgcatatgaatgccagccacgacgtcgggcggaaaactttcttcaggatttccgcgtacgaaatcagccagtaaattgccggaaaggctgctttccgcgagatgggctaaatgcaggtgagctaaaaaattcatcgattatattctatccaaaagggggtaaaggttgcagggagagcgccccggcactagactacccgcctcttattttagtctgagtcagtgtcatgcgcgttaccgatttctcctttgaattgcccgaatccctgattgcccactatcccatgcctgaacgcagtagctgtcgtttactgagcctggacgggccgacgggcgcgctgacgcacggtactttcaccgatttacttgataagctcaaccccggcgatcttctggtttttaataatacccgcgtgatcccggcgcgcctgtttgggcgtaaagccagcggcggcaagattgaagtgctggttgaacggatgctcgacgacaaacgcattcttgcgcatattcgcgccagcaaagcgccaaaacctggcgcagaactgctgctgggcgatgacgaaagtattaacgcaacaatgaccgcgcgccacggcgcactgtttgaagtcgaatttaatgatgaacgcagcgtgctggatattctcaacagcatcggccatatgccgctgccgccgtatatcgaccgtccggacgaagacgctgaccgcgaactttatcaaaccgtttatagcgaaaaaccgggcgcggttgcagccccgaccgcaggtctgcattttgacgagcctttgctggaaaaattgcgcgccaaaggcgtggagatggcgtttgtgacgttgcacgttggtgcgggcaccttccagccggtgcgcgtcgacaccattgaagatcacatcatgcacagcgaatacgctgaagtaccgcaggatgtggtagacgcggtactggcggcgaaagcgcgcggtaaccgggtgattgcggttggcaccactagtgtacgtagcctggaaagcgcggctcaggcagcgaaaaacgatctcattgaaccgttcttcgacgatacccaaatctttatctatccgggcttccagtacaaagtggtcgatgcgctggtgacgaacttccacttgccagagagcacgctgattatgctggttagcgcctttgccggttatcaacacaccatgaacgcctataaagcagcggtagaagagaaatatcgcttttttagttacggtgatgcgatgtttatcacgtacaatccgcaggcaattaatgagcgcgtcggggagtaattccgcggcgctggtttaaaacgttggactgtttttctgacgtagtggagaaaaaatgaaatttgaactggacaccaccgacggtcgcgcacgccgtggccgcctggtctttgatcgtggcgtagtggaaacgccttgttttatgcctgttggcacctacggcaccgtaaaagggatgacgccggaagaagttgaagccactggcgcgcaaattatcctcggcaacaccttccacctgtggctgcgcccgggccaggaaatcatgaaactgcacggcgatctgcacgattttatgcagtggaaggggccgatcctcaccgactccggcggcttccaggtcttcagccttggcgatattcgtaaaatcaccgaacagggcgtgcacttccgtaacccgatcaacggcgatccgattttcctcgatcctgaaaaaagtatggagattcagtacgatcttggtagcgatatcgtcatgatctttgatgagtgtacgccgtatcctgctgactgggattacgcaaaacgctccatggagatgtctctgcgttgggcgaagcgtagccgtgagcgttttgacagtctcggaaacaaaaatgcgctgtttggtatcatccagggcagcgtttacgaagatttacgtgatatttctgttaaaggtctggtagatatcggttttgatggctacgctgtcggcggtctggctgtgggtgagccgaaagcagatatgcaccgcattctggagcatgtatgcccgcaaattccggcagacaaaccgcgttacctgatgggcgttggtaaaccagaagacctggttgaaggcgtacgtcgtggtatcgatatgtttgactgcgtaatgccaacccgcaacgcccgaaatggtcatttgttcgtgaccgatggcgtggtgaaaatccgcaatgcgaagtataagagcgatactggcccactcgatcctgagtgtgattgctacacctgtcgcaattatagtcgcgcttacttgcatcatcttgaccgttgcaacgaaatattaggcgcgcgactcaacaccattcataaccttcgttactaccagcgtttgatggcgggtttacgcaaggctattgaagagggtaaattagagagcttcgtaactgatttttaccagcgtcaggggcgagaagtaccacctttgaacgttgattaatattaataatgagggaaatttaatgagcttttttatttctgatgcggtagcggcaacgggtgcaccggcgcaaggtagcccgatgtctttgattttgatgctggtggtattcggtctgattttctatttcatgatcctgcgtccacagcagaagcgcaccaaagaacacaaaaagctgatggactccattgccaaaggtgatgaagttctgacgaacggtggcctggttggtcgcgtaaccaaagtagcggaaaacggctacattgctatcgcgctgaatgacaccactgaagtagttattaaacgtgacttcgtagctgccgtcctgccgaaaggcaccatgaaggcgctgtaattaaaatttttccctaagggaattgccgtgttaaaccgttatcctttgtggaagtacgtcatgctgatcgtggtgattgtcatcggtctgctgtatgcgcttcccaacctgtttggtgaggatccggctgttcagatcactggtgcgcgcggagtcgccgccagtgagcaaacgctgatccaggtccagaaaacgttacaagaagaaaaaataactgctaagtctgtggcactggaagagggcgctattcttgcgcgcttcgactccactgacacccagttgcgcgctcgtgaagcattaatgggcgttatgggtgacaaatacgtcgtggcgcttaaccttgccccggcaacgccgcgctggctggcagctattcacgctgagccgatgaagctcggccttgacctgcgtggcggcgttcacttcctgatggaagtggatatggacaccgcgcttggcaaactccaggaacaaaatatcgatagcctacgcagtgacctgcgcgaaaagggcatcccgtataccactgttcgtaaagaaaacaactacggcctgagcatcactttccgcgatgctaaagctcgtgatgaagccattgcgtatctgagcaagcgccatccggacctggtgattagcagccagggcagcaaccagctgcgtgcggtaatgagcgatgctcgtctgagtgaagcgcgtgaatatgcggtgcagcagaacattaatatcctgcgtaaccgtgtaaaccaacttggcgtggcggagccggtggttcagcgtcagggtgctgaccgtatcgttgttgaactgccaggtattcaggacactgcgcgtgcgaaagagattctgggtgcgacggcaacgctggaattccgtctggtaaacaccaacgttgaccaggccgctgcggcatccggtcgcgtaccgggcgactctgaagtgaaacagacccgcgaaggtcagccagttgtgctgtacaaacgcgtaattctgaccggtgaccatatcaccgactccacttccagccaggacgaatacaaccaaccgcaggttaacatcagcctcgatagcgctggtggtaacatcatgtctaacttcactaaggacaacatcggcaaaccgatggcaaccctgtttgtggagtacaaagacagcggtaagaaagatgcaaatggtcgtgcggttctggtgaaacaggaagaggtgattaacatcgccaacatccagtctcgtctgggtaacagcttccgtatcaccggcatcaacaacccgaacgaagcccgtcagctgagtctgctgctgcgtgccggtgcgttgatcgcgccgattcagattgttgaagaacgtaccattggcccaaccctgggtatgcagaacattgaacaggggctggaggcttgccttgccggtctgctggtttctattctgttcatgatcatcttctataagaagtttggtctgattgcgaccagtgctctgattgccaacttgatcttaatcgtcggcattatgagcctgttgccaggcgcaacgctgagtatgccaggtatcgcgggtatcgtcttaacccttgcggtggcggtcgatgcgaacgtactgatcaacgaacgtattaaagaagagttgagcaacggacgtactgttcaacaggcaattgatgaaggttatcgtggcgcattcagttctatcttcgatgcgaacatcaccacgctgattaaagtcatcatcctgtacgcagtgggtaccggggcaattaaagggttcgcgattactaccggtatcggtgtggcgacgagcatgtttaccgcgattgtcggtacgcgtgccatcgtaaacctgctatatggcggcaagcgcgtcaagaagctgagtatctgaggagtgcgatgtggcacaggaatatactgttgaacaactaaaccacggccgtaaagtctatgactttatgcgctgggactactgggctttcggcatctctggtctgctgttaatcgctgctatcgttattatgggcgtgcgcggctttaactgggggctggatttcaccggtggtacggttattgaaattacgctcgaaaaaccggctgaaattgacgtaatgcgtgatgcattgcaaaaagccggttttgaagagccgatgctgcaaaactttggtagcagccatgacatcatggtccgtatgccgcctgctgaaggcgaaaccggcggtcaggtgttgggcagccaggttctgaaggtgattaacgaatccaccaatcagaatgcagcagtgaagcgtattgagttcgtcggtccgagcgtgggggcagaccttgcgcaaaccggtgcgatggcgttgatggcagcgctgctgtctatcctcgtgtacgtaggtttccgctttgagtggcgactggcggcaggggtggttattgcgctggcgcacgacgttatcattacgctgggtattttgagcttattccatatcgagattgacctgaccattgtggcaagcttgatgagcgttatcggttacagccttaacgacagtatcgtggtaagcgaccgtattcgtgaaaacttccgcaagatccgtcgcggtacgccttacgaaatctttaacgtgtccttgacccagacgctgcaccgtaccttgatcacatccggtactaccttgatggttatcctgatgctgtacctcttcggtggtccggtactggaaggcttcagcctgaccatgcttatcggtgtttccatcggtactgcatcttccatctatgtggcatctgcgttggctctgaaactgggtatgaagcgcgaacacatgttgcagcagaaagtggaaaaagaaggggcggatcagccgagtattctgccgtaatcaagttcccgttgatgttgaaaatcccggtcagaagatcgggattttttttgatgtatggagattgcgaaaatccccgcatcttgggaaactgcgcgtaaccctacatttcatccaggtaacttttcatggctatcatcccaaaaaactatgcgcggttagaaagcggctatcgcgaaaaagcattaaaaatctatccgtgggtctgcggtcgctgttcccgcgagtttgtttattccaacctgcgtgaacttaccgttcaccacattgatcacgaccataccaataacccggaagatggcagtaactgggaattgttgtgtctctattgccacgatcatgagcatagcaaatataccgaagcggatcagtatggtacgaccgttatcgcaggggaagatgcgcagaaagatgtcggtgaagcgaagtacaacccattcgctgacctgaaagcgatgatgaacaagaagaagtgattaaaacgtaaaattgcctgatgcgctacgcttatcaggcctacgttatttcagcaatatattgaatttacgtgcttttgttggccggacaaagcgtttacgccgcatccggcatgaacaaagcacacgttgttaacaatcagaaatgccgggaataaatcccggcattttcataatcagaagttgtaacctactaccaggtaaccaccccagccggtagagcgaacgttgaagttgccgttgccgaagttcagttctgcatcgtcgttccactgaccaccgtcgtgccagtaacgagctacgacagagtagtgccagtgatcgtagttcagagccagaatatggctggaagcgatagagttattagtacgggtcttaataccgttgattgcgttaccgctgtcatcccctaaatcggaaccccagtcgaagttggtgaagccgatgtagctcagctgaccgccccacagatcggtaatcggcacaaagtatttaattttgaaacggtaaccgtcccactcgttttcgttcgctgcgccatagttctgccactggtatttcgcatagacgttcatggacaggctcatcggcaggccagtgtcgatatcggtacccagacccatgtaccaggtgctctggcgaccatctttattacgacccatgtcgtaaatgtagttgttcgcgaagtaccactctttgaacggaccgaagctaaggtcagtattggtcagcttgtcgatggagaaacgtggttcgatttccataaacagcggagaaccgtggttccagatacctttagcatcggagttaccgccgaagaataccggcgcatccgcataaccatagaagtcgaaccagtcttttttagcgaatgcttcgtactcaaggtaggtatcgttgcggatctgcggtccgaaacgggtgtgatagcttccgacaacgttaacgctctggtgccaccagtcggaaagatactgcggtttgtcgttttcagctgcgttgacagtaaaagagctagagagcgccagtaccgcaccggctgccagtaatgtttttttcatatgtatgccactgtttgaaaatcccttgcgggagtgaaaaaggcgcaaattgcgtttctaaatatttcgtatacagaggagcctattataaaaatcattgctcacaaaaatatgtttcgtttcacagttctatcatttacgtaatcgattgcgttcacgtttacacacattcgggcggggattgtactgactttcgcccttgttgcaaacttttactatcaatccaggtgatgtaagcagagtaacaaaatgacggggaaagatgttgcgggacgcacaaaatcgtcccgaaatacgtttactgcataacaggttgaatgtcgtggatacgtacaaagcctaactgatccacagaaatcccctttaactgtaacggaatatcaacatcgctgggggcgaggacgctggcaggggcattaatcaattgattctgcacattgatttcctgaaagttgtctattgttccctgaatttgcccatattcaacagttccgctgaatgcgggcaagggatcattgctctcaccctgaatacgtagtgtaagggtggtgccatctgcatcaggcgtaatattcaccaggctcatacgtaaagtaccgatctggctttccagtcttgccggtgttttcgctccaggcagaaggtaaaccccactgctggattttgcattcagcctgttttgctgagtgattttgactgtttcttgattgagttgcgtcatctcctggttcagcgtgctgacgctgtgtttcatctgtcgcacttcactttgctgcacacaggcgctaaggctgaacaggcttcccagcaggagcagtcgaaaaacgttagtattcataggtcgtccctttctcgtcgcaattagcctaatggtagagggtaaaagcagcgaaagcatcgatcctttatctcaaaagcgttgcgcctttgttgtatcgtcagttcagggtaaaatagatttccgttaaccacctggtcaggacgccgtatgcattgcccattctgtttcgccgtggacactaaggtaattgactctcgtctcgtgggcgagggtagttccgtacgccgccgtcggcagtgtctggtgtgtaatgaacgtttcaccacctttgaagtggcggagctggttatgccgcgtgttgtaaaaagcaacgacgtgcgtgaaccgtttaatgaagagaaattgcgtagcggaatgctgcgggcgctggaaaaacgtccggtgagttccgatgacgtcgaaatggcaatcaatcatattaaaagccagctgcgcgccaccggtgagcgcgaagtgccgagcaagatgattggcaatctggtgatggagcaattgaaaaagctcgataaagtcgcctatatccgttttgcctctgtctaccgcagtttcgaagatatcaaagaatttggcgaagagatcgcgcgcctggaggactaagccgtgcaggacgagtattacatggcgcgggcgctaaagctggcgcaacgaggacgttttaccacgcatcccaacccgaatgtcgggtgcgtcattgtcaaagatggcgaaattgtcggtgaaggttaccaccaacgtgcgggtgaaccacatgccgaagtacacgcgttgcgtatggcgggtgaaaaagccaaaggtgcgaccgcctatgtcacactcgaaccctgtagccatcatggtcgtacgccaccgtgctgtgacgcactcatcgccgctggcgtagcgcgcgtggttgccagcatgcaagatcctaacccgcaggtcgctgggcgtggactttaccgtctgcaacaggctggcattgacgtcagccacggcctgatgatgagtgaagccgagcaattgaataaaggctttctcaagcggatgcgcaccggctttccttatattcagttaaaacttggcgcaagccttgatggtcgcacggcgatggcgagcggcgaaagccagtggatcactagcccccaggcgcggcgtgatgtacaactactgcgcgcgcaaagtcatgccattttaaccagcagcgccacggtgctggcggatgatcctgccttaacggtgcgttggtctgaactggatgaacaaactcaggcgctctatccgcaacaaaatctccgtcagccgatacgtattgtgattgatagccaaaatcgcgtgacgccggtacatcgcattgtgcagcagcccggcgaaacctggttcgcgcgtacgcaggaagattctcgtgagtggccggaaacggtgcgtaccttgctgattccagagcataaaggtcatctggatctggttgtactgatgatgcaactgggtaaacagcaaattaacagcatctgggtggaagcggggccaacgctcgctggcgcattgctgcaggcgggtttagtcgatgagctgattgtctatatcgcacctaaactattaggcagcgacgcccgcggattatgcacgctgccagggcttgagaaattagccgacgccccccaatttaaattcaaagagatacgtcatgtaggcccggatgtttgcctgcatttagtgggtgcatgatctcccggctcgaaagggaagcagcgcacgaaatattatgctaaaatccgcccccctgcggggccatactcgaacccgaaggaagaaaatgaacattattgaagctaacgttgctaccccggacgctcgcgtcgccatcaccatcgcgcgtttcaacaactttatcaatgacagcctgctggaaggtgcaattgacgcactgaaacgtatcggtcaggtaaaagatgaaaacattaccgttgtttgggtgcctggtgcctatgagctgccgctggcggcgggtgcactggctaaaaccggtaaatacgacgcggtgattgcgctgggtacggttattcgtggtggcactgcccactttgaatatgtcgctggtggtgcaagcaacggcctggcgcatgttgcccaggacagcgaaattccggttgcttttggggttctgaccactgaaagcattgaacaagcgatcgaacgtgctggcaccaaagctggcaacaaaggtgcagaagctgcactgaccgcgcttgaaatgattaatgtattgaaagccatcaaggcctgaaattagtaaggggaaatccgtgaaacctgctgctcgtcgccgcgctcgtgagtgtgccgtccaggcgctctactcctggcagttgtcccagaacgacatcgctgatgttgaataccagttcctggctgaacaggatgtaaaagacgttgacgtcctgtacttccgtgagctgctggccggggtggcgactaataccgcatacctcgacggactgatgaagccatacctgtcccgcctgctggaagaactgggacaggtagaaaaagcagtactgcgcattgcgctgtacgaactgtctaaacgtagcgatgtgccatacaaagtggccattaacgaagcgatcgaactggcgaaaagcttcggcgcagaagacagccataagttcgtcaacggcgtactcgataaagcagcacctgtgattcgccctaacaaaaagtgatatccaggccggtagattcacggaagaccgttccatgatcgccggccttttcttttttacctgctgaggcataacgtatggcatgtggcgagttctccctgattgcccgttattttgaccgtgtaagaagttctcgtcttgatgtcgaactgggcatcggcgacgattgcgcacttctcaatatccccgagaaacagaccctggcgatcagcactgatacgctggtggcgggtaaccatttcctccctgatatcgatcctgctgatctggcttataaagcactggcggtgaacctaagcgatctggcagcgatgggggccgatccggcctggctgacgctggcattaaccttaccggacgtagacgaagcgtggcttgagtccttcagcgacagtttgtttgatcttctcaattattacgatatgcaactcattggcggcgataccacgcgtgggccattaagtatgacgttgggtatccacggctttgttccgatgggacgagccttaacgcgctctggggcgaaaccgggtgactggatctatgtgaccggtacaccgggcgatagcgccgccgggctggcgattttgcaaaaccgtttgcaggttgccgatgctaaagatgcggactacttgatcaaacgtcatctccgtccaagcccgcgtattttacaggggcaggcactgcgcgatctggcaaatagtgccatcgatctctctgacggtttgatttccgatctcgggcatatcgtgaaagccagcgactgcggcgcacgtattgacctggcattgctgccgttttctgatgcgctttctcgccatgttgaaccggaacaggcgctgcgctgggcgctctctggcggtgaagattacgagttgtgtttcactgtgccggaactgaaccgtggcgcgctggatgtggctctcggacacctgggcgtaccgtttacctgtatcgggcaaatgaccgccgatatcgaagggctttgttttattcgtgacggcgaacctgttacattagactggaaaggatatgaccattttgccacgccataaagatgtcgcgaaaagtcgcctgaagatgagtaatccgtggcatctacttgctgtcggattcggaagtggattaagcccgatcgttcctgggacgatgggcagcctggcagcgattccgttctggtatctgatgacctttttgccctggcagctctacagcctggtggtgatgctggggatctgtatcggcgtctatctttgtcatcaaacggcgaaagacatgggtgtgcacgatcatggcagcattgtctgggacgaatttattggtatgtggatcacgctcatggcgctgccgaccaatgactggcagtgggttgccgccgggtttgtgattttccgtattctggatatgtggaagccgtggccgatccgctggtttgatcgcaatgtgcatggcggcatggggatcatgatcgacgatattgtcgccggggtgatttccgcaggcatcctgtattttatcggtcatcactggccgctgggtattctgagctaattgtgcaccgatgcctgatgtgacgcttgtcacgtctcatcaggcctggactcttatttaaatcctacgacaggatgcggtttatacggcgtttccagttcggcaatctgttccggcttcaaagtgatatccaccgcgttcaatagctcatcaagctgttcttcgcggctagttccgataatcggtgcggcaatgcccggtttactcaacaaccaggccagcgcaacttgtgctcgtgtcgcccccagttcttcactgacgcctgttaaccgctctgcgatctgcgcgtcattttcatcgctttctttatagagatttttccccacctcatcagacaccagtcgtgcggtagtttctccccacggacgcgtcagacggccccttgccagcgggctccatggaattaccgccacgccctcctgataacacagtggtagcatctcgcgctcttcttcacgataaatcagattgtagtgatcctgcatactgacaaactgcgcccagccgtgctgtttttggagttccagtgcctgagcaaactggctagcgtgcatactactcgcgccgatataacgcgctttcccggcttttaccacgtcgttgagggcttccagcgtctcttcgatcggcgtgttgtaatcccagcgatgaatttgcaggatatcgacataatccatgccgagacgtcgcaggctgtcgtcgatagagcgcaaaatttgcgcacgggataatccttccggtaaatcaccaacgcgatggaacactttggtcgcaacgaccacgtcttcacgacgggcgaaatcccgcagtgcgcgaccgacgatctcttcgctgctgccgtcagaataactgttggcggtatcaaagaaatttatgccgccttccagtgcacgtttaattatgggacggctgctttcttccggcagtgtccatgcgtgattaccgcgatctggctcgccaaaggtcatacagccgaggcaaagtcgggaaacgcgaaggtcggtttttcctaaggggttgtattgcatgctgccactcctgctatactcgtcatacttcaagttgcatgtgctgcggctgcattcgttcaccccagtcacttacttatgtaagctcctggggcttcactcgtttgccgccttcctgcaactcgaattatttagagtctatgaataatttcttaagcatagcaggagtggagtagggattatgccagccaggccttgattttggcttccataccagcggcatcgaggccgagttcggcgcgcatttcttcctgagttccttgcggaataaagaagtccggcaggccaatgttcagcacgggtactggtttacgatgggccatcagcacttcgttcacgccgctgcctgcgccgcccataatggcgttttcttctacggtgaccagcgcttcatggctggcggccatttccagaattaacgcttcatcaagcggtttcacaaaacgcatatcgaccagcgtggcgttcaggctttcggcgactttcgccgcttctggcatcagcgtaccaaagttaaggatcgccagtttctcgccacgacgcttcacaatgcctttgccaattggtagtttttccagcggcgtcagttccacgccgaccgcgttgccacgcgggtagcgcaccgcactcgggccatcgttatagtgatagccggtatagagcatctggcgacattcgttttcatcgctcggggtcataatgaccatttccggtatgcagcgcaggtaagagagatcaaaagcaccctgatgggtttgaccgtcagcaccaacaatgcccgcgcggtcgatggcgaacaggaccggaagcttttgaatcgccacgtcatgcagcacctgatcataggcgcgttgcaggaaagtggagtaaatcgcgacaatgggtttgtacccaccaatcgccagacccgcagcaaaggtcaccgcgtgttgctcggcaattgccacgtcgaagtagcgatccgggaatttacgactaaactcgaccatgccggaaccttcacgcatcgccggagtaatcgccatcagcttgttgtctttcgctgccgtttcgcacaaccagtcgccaaagattttactatagctcggcaaaccgccgctacttttcggcaaacaaccgctggagggatcaaatttaggcacggcgtggaaagtgatcgggtctttttctgccggttcataaccacgaccttttttggtcatgatatgcaggaactgcgggcctttcaggtcgcgcatgttctttagcgtggtgataagccccagcacatcgtgaccgtccaccgggccgatgtagttaaagcccagctcttcaaacaacgtgccaggcactaccatgcctttaatatgttcttcggtgcgtttgagcagctctttaattggcggcacgccagagaaaacttttttcccgccttcgcgcagactagagtaaagcttaccggaaagcagctgtgccagatggttgttgagcgcgccgacattttcggaaatgctcatttcattgtcgttgagaatcaccagcatatcaggacggatatcgcccgcgtgattcatcgcttcaaacgccatgcctgcggtaatcgcgccatcgccaatgacacagacggtgcggcgatttttgccttctttttcggcagcaaccgcaataccaattccggcactgatggaggtactactatgcccgacgcttaatacgtcatattcgctttcgccgcgccacgggaacgggtgcagaccgcctttctgacggatggtgccgattttgtcgcggcgtccggtcaaaattttatgcggataagcctgatgccccacatcccaaatcaattggtcaaacggggtgttgtagacatagtgcagcgccacggtcagttcgaccgtgcccagcccggaggcgaagtgcccgctggaacggctcacgctgtcgagtaaatagcggcgcagttcgtcgcagagtttcggtaaactctctttcggcaacagtcgtaactcctgggtggagtcgaccagtgccagggtcgggtatttggcaatatcaaaactcatcaggggcctattaatacttattgtttatttattacgctggatgatgtagtccgctagcgcttccagtgcgctggtatcgagactctgttcagccagttgtttcaggctctgacgggcatcgtcgatcagatcccgggctttcttccgggcttgctcaagacccagaagtgcagggtaggtacttttaccaagttgctggtcggcaccctggcgttttcccaacgttgcagtatctcccaccacatccaggatgtcatcctgaacctggaaggcaaggccgatgctctctgcatacttgtcgagtaccggcagagcacgacgtcctttatctccggcgcttaatgcaccaaggcgaacggcggcgcgaatcaatgcgccggttttatgacgatgaatacgctcaagcgcgtccagaggtacgtgtttgccttccgcgtctaaatctaatgcctgaccaccgcacattccggcaataccactggcgctcgccagttcagaaatcatgctaattctgtcgcggtcgctcacttccggcatatcggcatcgcttaaaatgctgaacgccagcgtttgtaaagcgtcgccagcgagaatcgcgtttgcttcgccaaacttcacatggcaggttggcaaaccgcgacgcagatcgtcatcatccattgccggtaaatcatcatgaattaaactgtaagcgtggatacactcaacggcggcagcgggtgcgtccagcgtgtttgtgctaacgccgaacatatgaccggtggcataaaccaggaaaggtcgcaggcgcttaccacctaataatgcgccatactgcatggtttcgaccacgggagtgttctgaaagggcagtggggcgataaaacggctcagcgcctggttggcctgcttaacgcaggcttcgagttgctgcggaaagtccattactcattgtccggtgtaaaaggggttagagaggcgtcttcattgtcagacagcagaatttgtacgcgctgttcggcttgttgtaatttggcctgcccctgacgtgccagctgcacgccgcgttcgaactcgttcagcgcctcttccagcggcaggtcgccactttccagacgggttacaatctgttccagctcgctcagcgccttttcaaagctggcgggcgcctcatttttcttcggcataatgaatgtctgactctcaatatttttcgccccgtcatggtaacggactcagggcaaatagcaaataacgcgcaatggtaaggtgatgtgcacagcaaagcgatgttagtggtatacttccgcgcctggatgcagccgcaggtgtgggctgctgtatttttccctatacaagtcgcttaaggcttgccaacgaaccattgccgccatgaagtttatcattaaattgttcccggaaatcaccatcaaaagccaatctgtgcgcttgcgctttataaaaatccttaccgggaacattcgtaacgttttaaagcactatgatgagacgctcgctgtcgtccgccactgggataacatcgaagttcgcgcaaaagatgaaaaccagcgtctggctattcgcgacgctctgacccgtattccgggtatccaccatattctcgaagtcgaagacgtgccgtttaccgacatgcacgatattttcgagaaagcgttggttcagtatcgcgatcagctggaaggcaaaaccttctgcgtacgcgtgaagcgccgtggcaaacatgattttagcagcattgatgtggaacgttacgtcggcggcggtttaaatcagcatattgaatccgcgcgcgtgaagctgaccaatccggatgtgactgtccatctggaagtggaagacgatcgtctcctgctgattaaaggccgctacgaaggtattggcggtttcccgatcggcacccaggaagatgtgctgagcctcatttccggtggtttcgactccggtgtttccagttatatgttgatgcgtcgcggctgccgcgtgcattactgcttctttaacctcggcggcgcggcgcatgaaattggcgtgcgtcaggtggcgcattatctgtggaaccgctttggcagctcccaccgcgtgcgttttgtcgctattaatttcgaaccggtcgtcggggaaattctcgagaaaatcgacgacggtcagatgggcgttatcctcaaacgtatgatggtgcgtgccgcatctaaagtggctgaacgttacggcgtacaggcgctggtcaccggcgaagcgctcggccaggtgtccagccagacgctgaccaacctgcgcctgattgataacgtctccgacacgctgatcctgcgtccgctgatctcttacgacaaagagcacatcatcaacctggcccgccagattggcaccgaagactttgctcgcacgatgccggaatattgtggtgtgatctccaaaagcccgacggtgaaagcagttaaaagcaagattgaagcggaagaagagaagttcgacttcagcattctcgataaagtggttgaggaagcgaataacgttgatatccgcgaaatcgcccagcagaccgagcaggaagtggtggaagtggaaaccgtcaatggcttcggcccgaacgacgtgatcctcgatatccgttctatcgatgaacaggaagataagccactgaaagtcgaagggattgatgtggtttctctgccgttctataaactgagcaccaaatttggcgatctcgaccagaacaaaacctggctgctgtggtgtgagcgcggggtgatgagccgtctgcaggcgctctatctgcgcgagcagggctttaacaatgtgaaggtatatcgcccgtaatttgtggtttttacgtcgcatctggtcagatgcgacgtttgccgcatccgacattactcgtaataattataaatccctgccgccatcaccagttgacttgccacttcatgggctttttcacgcccaaccaacaggtcgataattttcagaccaaagtcgatagctgtacccggcccctggctggtcagcaattttacccgtgcatcccagacgacgcgcttgtccagccattgttcggcgggaattttgtctttcagcgtcgggaagccggtcatattaccaatcgggaagatatcgtgcggcaccagcacggtggctggcgcggcgcaaatagccgcgacgatacgcccggaacggtggaactgtttaacggtttcaaccagcagagtgctatcgcgaaaacactccgcgcctttaatgccaccaggcagcacgatcacgtcatattcgccatcagccacttcgaccagcggcgcatccgccagcagcttcacgccgcggctgcaggtaatcgccaggttaccatcgctggcgacgctggcagtggtgactttgataccgccgcgaaccagcagatcgatagtggtgacggcttcagtctcttcactaccaggggcgaggcaaaccagtgcgcttgcgctcatattcactctcctttctttttttaattaccaggggcgaggcaaaccagtgccgatgcgctcatattcactctcctttctttttaccatttcaaacaggcgggtgttttccggtacggcaatcccatgcgcgcgggcgcggcgtaagagaaaaccattgatatagtcgatttcagtgtggcgcagcgcgcggatatcctgcaacatgctgctgatattttccgctgtggcatcaatcacctgcatcacgtaatcacgcaaatcttctgcactagtatgatgcccttcgcgttcgatcaccgccgcgacttcttcgcatatctgcataatttcttgcggatgatgacgtaattcaccgttcgggcaattccagatggcagtcagtggattaatcacgcagttgactgccagcttgcgccacagctcggcgcgaatattgttatgccaggcaacgtcaggcaacacggtttgcaaaatatccgccagataactgtaatccccgtcctgttgccgtgccgggccaatatgcgtgataccgtttgccacatgaataatgacattgccgtcgcggcgggctgcatgggtggtggtgcccatcagtaatggctgctgaatgttttgcaactcttcgatggtgcccatgccgttgtgaattaacagtattggcgtagttacaggcagtgtggacgcgaggcttttgacggcatcggaaacctgccatgctttcagcgtcaccaggagcagatcgctggtggcgagaaaatcgggatcgttggcggtcaggctttcgttaaatatgctaccatctgtctcaaccagattcacgctacaataaggttgcggtacgcgcagccagccctgaacttcatgaccctgtttgcaaagtgctgtaagccataattgccctaaggcaccgcatcccaatacggtaattttcattgttcctcctcacccgcaaccactccgggtgttcaataaggctatcccttaattgtgcatgctgttgcgactatgcacaattaagggatacgtcctggtgcaggactgtcggttatttaactttgcgggtattatgcttcgcatcaaaaatgaagggagaggaaaagatgccatctttcgatattgtctctgaagttgatcttcaggaagcacgtaacgcggtcgataacgcgagccgcgaagtggagtcccgttttgacttccgtaacgttgaagccagttttgagctgaacgacgccagcaaaaccatcaaagtgttgagcgagtccgatttccaggtcaatcagttgctggatattctgcgtgccaagctgctgaagcgcggcattgaaggcagtagcctggatgtaccggagaatatcgttcatagcggtaaaacctggtttgtggaagcgaaactgaaacagggcattgagagcgcgacccagaagaaaatcgtcaagatgatcaaagacagcaaactgaaagtgcaggcgcaaattcagggcgatgaaatccgcgtaacgggcaaatctcgtgatgatttgcaggctgtcatggcgatggtacgtggtggcgatctcggtcagccgttccagttcaaaaacttccgcgattaatcgcgactatgtgcgttttgttcatgtcagatgcggcatgaacgcctgattcggcctacaaaggtttgtaattcagaaactttgtaggcctgataagcgtagcgcagcaggcaattcgccgcgttttttatgcctgacgaattgcctgttctatctcaaagcgattcgtcactttgctgtcgattttcacataagcactatgttcttcttctgcaatcaacacttctttgatgccttcagtttctagcaaacgcacttttaacgcctcgtttgcggcaatgttcgccgggatttcaatgcgcaaactgctgacatacggcggttctttcatggtactggcgactgtcagccacactgcggccagcattgcgccagcgagaaataccccctgaccgtcaaacatgccgttaatccagccgcccaggctaccgccaatcgccacgccaagaaactggctggtggagtaaacacccatcgccgtacctttgtaacctgctgggctctctttactgataagactgggcaggagggcttccatcaaattaaacgccacaaagaaaagctgcacgccgaccaccagttgccagaactgcgtttgcgcgttccacaacacaatttccgcaaccacgatcaacccgacgcagaagacaaagacttgcttcattttgcgcttaacttcagcgtagataatgaaaggcacgacgctgccaaaggcgattagcattgtcgccagatagaccttccagtgttcagccgccgggaaccctgcatcagccagttgtccgggcagggcaacaaacgtgctcatcagcaaaatatgcagacacataatgccaaagttgagtttcagcagccgcggttccgccagcactttactgaaactgcctttcaccattccggactcacgattaagtacgtgagtgctactgttgggcacaacccaaatggtcaacgcaatgccggtcgttgccagaatagcgatcatccagaacagcgcgtgcagcccaagtttgtgagtgatgatcgggccaagcaccatcgcaatggcaaaggtaatgccaaagctcacgccgataaacgccatcgctttggtgcggttttgttcgcgcgtgagatcggaaagcagcgccataacggcggcggcaattgctccagagccttgtagcgcccggcccagaataattccccagatggagtcggaaagcgcagcgataacgctaccggcggcaaacaccgccagcccaccgacaattaatggtttgcgaccaatgcggtcggaaagcaggccaaacggaatctgaaaaacggcctgagtcagaccataaataccaatggcaataccgattaatgcttcgctggcaccttgcagagccatgccgtacgtggtcagaaccggcagaaccataaacatgcccagcatgcgcaagctgaatacggtccctaaaccccaggtcgcgcgcctctcacctggcgtcattttataatcgttcattaccacctctgttttaaattcgcgactagtgtaaagcggcaaacgaatggggtaaacatgcggattttttagtaaatatttcgagagggatatgtttctaatgctaagaaaaaaggtgccgtagcacctttttaatagagaggttttgttaccacacagcagccagcagcgtatggctgtccggtaccataaaatcaacggacatcatcacgctgagggcagtgatggcgatgatagagaagccgaacagcttgcgcgcccagattctgtcatcagcaactttataaccgcgcagagccatacctaaccaccagacgctaaccgccgcggcgaccaccagatatttatacccagcgtaaccgccaagagagagcatcagcgtggcaacggcaaaggcgatgatatacagcgtgatgtgattcttcgccacgctaatgccttttaccactggcaataccggaatgtttgccgcctggtaatccttaaagcggaaaatggcgatggcataggagtgaggcatctgccacaggctgaagatagccagcaggatcgctgcgccgctatcgaactcaccggttaccgcacagtagccgatcaccggcggcgcagcgccggagaggctaccaatcaacgtgccgtagacagagtggcgtttcatgtacaggctataaacgccgacataaaccacaaagcccatcacccccagccagcaggccagcggattcgcgccaaaccacagcagcataaagccagcaatacccagcaacgtggcgtacaccaggctgacagcaggagagatcaggcctttcaccagcacccgattcttcgtcctttccatctttctgtcgatatccctgtcgatgtagttgttaaacacacaaccgctcgccacaaccagactcaccccaaccagcgtgtagataaacaggggataatcaatgctgcccttactggccagcaggaatcccccaatcacgctgatcaggttgccaaagatgatgcctggtttcgttacttgcaggtattgcttaaacatcataaccgccgctcttagtgcatcatcatgttgtagttgaggttccacataatccagatggagcctacaaccaggatagcgatgattagcacggtgaagacaaacgccgtcatgttccagccttcatcacttttggtattcatgtgcaggaagcacaccagatgcaccagaacctgtaccactgccattgccaggattgttcccagaattacggccggagaggcagctcctgtcatcaccatccagaacggaatcaccgtcagaatgatgctcaggataaagcctgtcatgtaggtttttacgctgccatgggacgcgccgctgtgatcggtagaatgactcattacatcgcccccatcagataaacaacagtgaacacacagatccaaaccacatccaggaagtgccagaacaggctcaggcacatgatgcgggtacggttagtgctggtcaggccgcgacgggcgatttgcaccatcagcaccgccatccagataagaccagaagtgacgtgcagaccgtgcgtgccgaccagcgcaaagaacgcactcaggaagccgctgcgatccggacccatgccgttaacaatcaggtgatggaattcatagatttccatcccgataaatccggcaccaaacaaccaggtcaacgccagccaggagataacctggcttttgttgtttttgtacatggcgatagccgccatgccgtaggtgatggagctgaacaacagcaagaaagtttcaaccagaacgaacggcagttcgaaaatgtccttacctgtcgggccgcctgcggtgccgttcaccagaacggcataggtagcaaacaagatagagaacagaatgcagtcgctcatcaggtagatccaaaatccgaagattttggttccgcctgcatcgtggtgcccgtgttcgtgcgcgtgggcagtcgcgtgcgtcaaagtatcagttgccatttttcagccctgccttagtaatctcatcgaaatgctggttttccagtttttcgatttctgccaccggcacgtagtaatccacgtcctcgtcgaagcttttcacgatccaggtgatgatcatgcctgcgaagccaacaatcgccagccaccagatatgccagatcatggcgaaaccgaagatggtggagaaagctgcaatgacgatacctgcaccgctgtttttcggcatatgaatttcttcatagtggtcaggctttttatacgcttcgcctttctctttcatttcccagaatgcatcacgttcgtgaacgtgcggcactacggcaaagttatagaacggaggcggggaagaggttgcccactccagcgtacggccaccccacgggtcgccagtcaggtcacggttctggtcgcggtcgcgaatagaaacgtacatctgaataacgaggcagagaatacccagcgcaatcagtactgcaccgctggctgcaatcatcagcatggtgtggaactgcgggtcaatctgctggctcaaacgacgggtcatgcccatgaagcccagcgcatacagtggcataaaggcaacgaagaagccgatgatccagaaccagaacgcgcgtttaccccaggtttcgttcagtttgaaaccgaacgctttaggccaccagtaggtcatccctgcgaagcagccgaagaccacgccgccgatgatcacgttatggaagtgcgcaatcaggaacaggctgttatgcagaacgaagtccgcgcccggtacggccagcagcacgccagtcatcccgcccacgctgaaggtgacgataaaaccgatggtccacagcatcgcagaatggaacacgatgcggccctgatacatggtgaacagccagttgaagatcttcaccccggtcgggatggcgataatcattgtggtgataccaaagaaggcgtttacgttcgcgcccgcacccatcgtaaagaagtggtgcagccaaacgatgaagctcagcacggtgatacagacggttgcccataccaggctggtataaccaaacagacgtttacggctgaaggttgccgcaatttcggagaacacaccgaaaacaggcaggatcaggatgtaaacttccgggtggccccaggcccaaatcaggttgatgtacatcatcatgttgccacccatatcgttggtaaagaaatgggtgcccagatagcgatccagggtcaacaacgcgacggtaaccgtcagaattgggaaggaagcaataatcagtacgttcgcgcacagacttgcccaggtaaatactggcatcttgaacatggtcatgcccggtgcgcgcatcttcagaatggtaacgaagaagttgataccggtaagcgtcgtacctataccggatagctggagactccatatccagtaatcgacaccgactcccggactgtactctattccgcttagcggtggataggccagccagccggtctgcgcaaattcgcccacgccgagagaaacgttaaccagaatcacaccaacaacggtaaaccagaagcttaagttgttgaggaacgggaacgcaacgtcacgcgcgccgatctgcagcggaaccaccaggttcatcagaccgataacgaaaggcatcgccacgaagaagatcataatcacgccgtgcgcggtaaagatctgatcgtagtggtgaggtggcaggaagcccgcttcgcccgcgctggcaagagcctgctggctacgcatcataatggcgtcagcaaaaccacgcagcaacatcacaatcgccacgatgatatacatgataccgaggcgtttatggtcgacggaggtcagccactctttccacaggtaggtccacttaccgaagtaagtgatcaggccaacgagcgccagacctcccaaaataatgccagcgatcgtaaccatgacgataggttcatggaacgggactgcatcaagacttaattttccgaacatctttattcttcctcaacccctttaatgggcggattccgcgtggctcatgtccatgccttccataccttcgtgtgcgctgtgctcaccttctggctgggtcatgtccatgctcttaccgtgagccataaacttgttaattacatcggcaaacaagtctggtttcacgttggagaaatattccacctggttgtattcgctaggcgcggccagtttttcgaacgcagccatgtcagacatggtgttcgggctctgcttcgcttttgcgacccactggtcgaatgcggcgcgatccggtgttgcaatagctttgaacttcatgccactgaagcccgggccgctgtagctggcggagataccgtcataagtgccgggttcgttggcgatcagatgcaggcgagtctgcataccggccatggcataaatctggctacccagacgcggaatgaagaaggagttcatcacggagttggaggtcactttgaagtacaccggagtgttcgccgggaaagcgatttcattcacggtagcaatgccctgttccgggtagatgaagaaccatttccagtccatggaaaccacttcgatggtaatgggcttctcgtcgtgtgccagcggcttgctaggctcaagagcgtgagtggttttccaggtcagtactgcaaggaagatgatgattaagataggtaccgtccagaccacagcttccactttattggagtgactccagttcgggctgtacttagcatctttattgctcgcacggtacttccaggcgaaaccaacagccatcaagattgcgggaataacgacaatcaacatcaggccaaatgccgtcagtatcagactacgttgctccagaccaatctgtcctttgggatctaacagcgcagaattacagccactgagcaatacagtgcctgcaaataaactcaaccatcccaaacttttattgtatttcctgagtctcatttaacgacctcaattccacgggatctggtggcgtttaaagtgtgtgggcattttacgggaaggttacattactgtaaacatgattaaattcctgttacttggatttggctgccaggtcacatatgttgcaaaacatatcaggttgattttaagaagctgttgcaaaagggcgttataacaaaaggggagtgctgaaggagtctgggcgggcaattggtataaccaatgtgaaataaaacaattatttaacaaataattatcattagagtgacaactgggtgatgagaaaataaagactcattagctgaatcgtgtaagaaaaatagaatttataaatggcgccaataatttccaaacgctaagccgcacaaaagaacaaatattaataagcgatactgatgtttatttagccgtaataattacggcgagtgattactacagctaaataatatttacagattacgtcagatgcgtttttcgtagcgccagataatccagcaaaccaccaagcacgacgccagaaagggcgactaaaaccccgacttccagcagagcaggcaggaaagagaagtgcgtcaaatccagcgcgtccatcgtcaatagcagtaaccacacggccaacaggctgacgcccgccgccagtgtccacatggcaaaggcataacctgccggatatgcggtacgggagataaagttgtcatttactcgtgtatattcaagcgtctggcggcaaaccagcagcaaaataagccctggtacggcagcggcgacggagaatagatagaatgtgctccagccgtgtgcttcaacaaaccaacccgccacggggccgacataaactcgccctacagcagaaagcgcactgagcagggcaaattgagtagcggaaaaactcttattacatagcgtcattaacagcgcgacaaaggcacttgtgcccatcccgccacagaggttttcgaaaaagacggctgcgcccatgctgtagagatgcttatcagtaatgctcagcagccagtaaccggcgttagacgcaccttgtaaaatgccgaaaatcagcagtgcccggaacagactcaggcgctgcatcaaaatcccaccgtacaatgcgccaacaatggtcgctagtaagccaagcgttttgttaaccacgcctacttcacccgcatcaaacccgacgccgcgaatcaaaaacgtggttgtcaggctcatggcgaatgcgtcgcccagcttatacagcacgataagaagcaaaataagccaggcattattgcgaccaaagaaatctcgcagaggtgcaacaaccgcttgttccagcgttttgggcacaggaatggtgtcggttggttctggtgcaagcaacgtcgcgataatacaggggatcaacagtgccgccattaaccagtacatgccctgccagcccagccatttatctgccagccacagggctaggccgccggaaaccagcatccctaaacggtaacccagcacgctgattgccgcgcccgcaccacgttcttctgccggaagcacatcggttttccacgcatcgaagactatatcctgggaagcagagcaaaaagcgatcaccactgccagcgccgccatccagcggagttgggtgcctggttcgagaaaacccatcgccgcaatggcgactaataacaggatttgcgtggcgagcagccaaccgcgccgccgcccaaaaaatggaggcgtgtagcggtccatcagcggactccagaggaatttaaaaacgtaagcctggcctaccagagagaagaaaccaatggttttgagatcgatattctcgaccgtcatccaggcctgtaaggtaccggatgtcagggcgagcggtagcccggaagcaaaacccaggatcagcaatatggcactacgcggctgttgaaaaatacgtaaatattgactggacatgggcgtctacaggcccggcttgcaccgggccagagggcagaaattaacgcgcgttctgcttgatgaattcgtggatgctggtgtcctgagacatatcagcgatggtatcggtcagcacactgttaaccgcatcggcgatatttttgttggaggcctggaacgcaccttcaacgttgtagctggcacgatagtttttggtcattttgttgccattctgcgcggtagcgatgatggcgatatccgctttggtcgcgatgttgtagcgcacgttgccctgggacacgtcagcatacagttggctaacgatgatttgcagattaaccgggccattcggaccaaccatgtaaccacgcgcggtcatctgtttttccagcacttcttgcagcaggaaacgcagatcgcgggaggcggtcagggtaacgatttgattatcgcgggtgacttttgccagcgcctgatcggtacgctgatcggcaccattaatgcttacggtgacgcccatcaggcttggatcctgctgtggcagtgtaatcgtcggggaaacttcaatagttgttggcggttttgcgcatcctgcaagcataaacagagcaactaacgggaagaggatttttttgaacatgttcgggctctcagagactcttaagcgtgtttggtaaaaattcccgccatcataacattgccaacggcgaggggaagtgggtaaggcatgtaaattcatcatgttgacgaaataatcgcccctggtaaaagaaacactgatgcgaggcctgtgtttcaatctttaaatcagtaaacttcatacgcttgacggaaaaaccaggacgaaacctaaatatttgttgttaagctgcaatggaaacggtaaaagcggctagtatttaaagggatggatgacatctcagcgttgtcggaggagatatttcatgatgatacgtgagcggatagaagaaaaattaagggcggcgttccaacccgtattcctcgaagtagtggatgaaagctatcgtcacaatgtcccagccggctctgaaagccattttaaagttgtgctggtcagcgatcgttttacgggtgaacgttttctgaatcgtcatcgaatgatttacagtactttagcggaggaactctctactaccgttcatgcgctggctctgcatacttacactattaaggagtgggaagggttgcaggacaccgtctttgcctctcctccctgtcgtggagcaggaagcatcgcgtaaaaacgcatttgcaactgtcggcgcttttccagtatgttgctaaagattttatgaaaaacggcctgcgggccgttttgttttgtctggattttgcgctttttgcccagcattcagacgaaaattgcccgggaattgtgaaaaaatacgcgacagcgcgcaataaccgttctcgactcataaaagtgatgccgctataatgccgcgtcctatttgaatgctttcgggatgattctggtaacagggaatgtgattgattataagaacatcccggttccgcgaagccaacaacctgtgcttgcggggtaagagttgaccgagcactgtgattttttgaggtaacaagatgcaagttagtgttgaaaccactcaaggccttggccgccgtgtaacgattactatcgctgctgacagcatcgagaccgctgttaaaagcgagctggtcaacgttgcgaaaaaagtacgtattgacggcttccgcaaaggcaaagtgccaatgaatatcgttgctcagcgttatggcgcgtctgtacgccaggacgttctgggtgacctgatgagccgtaacttcattgacgccatcattaaagaaaaaatcaatccggctggcgcaccgacttatgttccgggcgaatacaagctgggtgaagacttcacttactctgtagagtttgaagtttatccggaagttgaactgcagggtctggaagcgatcgaagttgaaaaaccgatcgttgaagtgaccgacgctgacgttgacggcatgctggatactctgcgtaaacagcaggcgacctggaaagaaaaagacggcgctgttgaagcagaagaccgcgtaaccatcgacttcaccggttctgtagacggcgaagagttcgaaggcggtaaagcgtctgatttcgtactggcgatgggccagggtcgtatgatcccgggctttgaagacggtatcaaaggccacaaagctggcgaagagttcaccatcgacgtgaccttcccggaagaataccacgcagaaaacctgaaaggtaaagcagcgaaattcgctatcaacctgaagaaagttgaagagcgtgaactgccggaactgactgcagaattcatcaaacgtttcggcgttgaagatggttccgtagaaggtctgcgcgctgaagtgcgtaaaaacatggagcgcgagctgaagagcgccatccgtaaccgcgttaagtctcaggcgatcgaaggtctggtaaaagctaacgacatcgacgtaccggctgcgctgatcgacagcgaaatcgacgttctgcgtcgccaggctgcacagcgtttcggtggcaacgaaaaacaagctctggaactgccgcgcgaactgttcgaagaacaggctaaacgccgcgtagttgttggcctgctgctgggcgaagttatccgcaccaacgagctgaaagctgacgaagagcgcgtgaaaggcctgatcgaagagatggcttctgcgtacgaagatccgaaagaagttatcgagttctacagcaaaaacaaagaactgatggacaacatgcgcaatgttgccctggaagaacaggctgttgaagctgtactggcgaaagcgaaagtgactgaaaaagaaaccactttcaacgagctgatgaaccagcaggcgtaatttacgcagcataacgcgctaaattcgcacaaaggcccgtcaccgccaggtggtgggcttttttttgtcatgaattttgcatggaaccgtgcgaaaagcctctttcggtgttagcgtaacaacaaaagattgttatgcttgaaatatggtgatgccgtacccataacacagggactagctgataatccgtccataaggttacaatcggtacagcaggttttttcaattttatccaggagacggaaatgagttacagcggcgaacgagataactttgcaccccatatggcgctggtgccgatggtcattgaacagaccagtcgcggtgagcgctcttttgatatctattctcgtctacttaaggaacgcgtcatttttctgactggccaggttgaagaccacatggctaacctgattgtggcgcagatgctgttcctggaagcggaaaacccagaaaaagatatctatctgtacattaactccccaggcggggtgatcactgccgggatgtctatctatgacaccatgcagtttatcaagcctgatgtcagcaccatctgtatgggccaggcggccagcatgggcgctttcttgctgaccgcaggggcaaaaggtaaacgtttttgcctgccgaatagccgcgtgatgattcaccaaccgttgggcggctaccagggccaggcgaccgatatcgaaattcatgcccgtgaaattctgaaagttaaagggcgcatgaatgaacttatggcgcttcatacgggtcaaagtttagaacagattgaacgtgataccgagcgcgatcgcttcctttccgcccctgaagcggtggaatacggtctggtcgatagcattctgacccatcgtaattgatgccagaggcgcaactgtgccgctatacttatccagggcggcacaacgctgtaagcggcttgcgcctgagaatggcatttgcgtcgtcgtgtgcggcacaaagaacaaagaagaggttttgacccatgacagataaacgcaaagatggcagtggcaaattgctgtattgctctttttgcggcaaaagccagcatgaagtgcgcaagctgattgccggtccatccgtgtatatctgcgacgaatgtgttgatttatgtaacgacatcattcgcgaagagattaaagaagttgcaccgcatcgtgaacgcagtgcgctaccgacgccgcatgaaattcgcaaccacctggacgattacgttatcggccaggaacaggcgaaaaaagtgctggcggtcgcggtatacaaccattacaaacgtctgcgcaacggcgataccagcaatggcgtcgagttgggcaaaagtaacattctgctgatcggtccgaccggttccggtaaaacgctgctggctgaaacgctggcgcgcctgctggatgttccgttcaccatggccgacgcgactacactgaccgaagccggttatgtgggtgaagacgttgaaaacatcattcagaagctgttgcagaaatgcgactacgatgtccagaaagcacagcgtggtattgtctacatcgatgaaatcgacaagatttctcgtaagagtgacaacccgtccattacccgagacgtttccggtgaaggcgtacagcaggcactgttgaaactgatcgaaggtacggtagctgctgttccaccgcaaggtgggcgtaaacatccgcagcaggaattcttgcaggttgatacctctaagatcctgtttatttgtggcggtgcgtttgccggtctggataaagtgatttcccaccgtgtagaaaccggctccggcattggttttggcgcgacggtaaaagcgaagtccgacaaagcaagcgaaggcgagctgctggcgcaggttgaaccggaagatctgatcaagtttggtcttatccctgagtttattggtcgtctgccggttgtcgcaacgttgaatgaactgagcgaagaagctctgattcagatcctcaaagagccgaaaaacgccctgaccaagcagtatcaggcgctgtttaatctggaaggcgtggatctggaattccgtgacgaggcgctggatgctatcgctaagaaagcgatggcgcgtaaaaccggtgcccgtggcctgcgttccatcgtagaagccgcactgctcgataccatgtacgatctgccgtccatggaagacgtcgaaaaagtggttatcgacgagagcgtaattgatggtcaaagcaaaccgttgctgatttatggcaagccggaagcgcaacaggcatctggtgaataattaaccattcccatacaattagttaaccaaaaaggggggattttatctcccctttaatttttcctctattctcggcgttgaatgtgggggaaacatccccatatactgacgtacatgttaatagatggcgtgaagcacagtcgtgtcatctgattacctggcggaaattaaactaagagagagctctatgaatcctgagcgttctgaacgcattgaaatccccgtattgccgctgcgcgatgtggtggtttatccgcacatggtcatccccttatttgtcgggcgggaaaaatctatccgttgtctggaagcggcgatggaccatgataaaaaaattatgctggtcgcgcagaaagaagctagtacggatgagccgggtgtaaacgatcttttcaccgtcgggaccgtggcctctatattgcagatgctgaaactgcctgacggcaccgtcaaagtgctggtcgaggggttacagcgcgcgcgtatttctgcgctctctgacaatggcgaacacttttctgcgaaggcggagtatctggagagcccgaccattgatgagcgggaacaggaagtgctggtgcgtactgcaatcagccagttcgaaggctacatcaagctgaacaaaaaaatcccaccagaagtgctgacgagcctgaatagcatcgacgatccggcgcgtctggcggataccattgctgcacatatgccgctgaaactggctgacaaacagtctgttctggagatgtccgacgttaacgaacgtctggaatatctgatggcaatgatggaaagcgaaatcgatctgctgcaggttgagaaacgcattcgcaaccgcgttaaaaagcagatggagaaatcccagcgtgagtactatctgaacgagcaaatgaaagctattcagaaagaactcggtgaaatggacgacgcgccggacgaaaacgaagccctgaagcgcaaaatcgacgcggcgaagatgccgaaagaggcaaaagagaaagcggaagcagagttgcagaagctgaaaatgatgtctccgatgagcgcagaagcgaccgtagtgcgtggttatatcgactggatggtacaggtgccgtggaatgcgcgtagcaaggtcaaaaaagacctgcgtcaggcgcaggaaatccttgataccgaccattatggtctggagcgcgtgaaagatcgaatccttgagtatcttgcggttcaaagccgtgtcaacaaaatcaagggaccgatcctctgcctggtagggccgccgggggtaggtaaaacctctcttggtcagtccattgccaaagccaccgggcgtaaatatgtccgtatggcgctgggcggcgtgcgtgatgaagcggaaatccgtggtcaccgccgtacttacatcggttctatgccgggtaaactgatccagaaaatggcgaaagtgggcgtgaaaaacccgctgttcctgctcgatgagatcgacaaaatgtcttctgacatgcgtggcgatccggcctctgcactgcttgaagtgctggatccagagcagaacgtagcgttcagcgaccactacctggaagtggattacgatctcagcgacgtgatgtttgtcgcgacgagcaactccatgaacattccggcaccgctgctggatcgtatggaagtgattcgcctctccggttataccgaagatgaaaaactgaacatcgccaaacgtcacctgctgccgaagcagattgaacgtaatgcactgaaaaaaggtgagctgaccgtcgacgatagcgccattatcggcattattcgttactacacccgtgaggcgggcgtgcgtggtctggagcgtgaaatctccaaactgtgtcgcaaagcggttaagcagttactgctcgataagagtttaaaacatatcgaaattaacggcgataacctgcatgactatctcggtgttcagcgtttcgactatggtcgcgcggataacgaaaaccgtgtcggtcaggtaaccggtctggcgtggacggaagtgggcggtgacttgctgaccattgaaaccgcatgtgttccgggtaaaggcaaactgacctataccggtagcctcggcgaagtgatgcaggagtccattcaggcggcgttaacggtggttcgtgcgcgtgcggaaaaactggggatcaaccctgatttttacgaaaaacgtgacatccacgtccacgtaccggaaggtgcgacgccgaaagatggtccgagtgccggtattgctatgtgcaccgcgctggtttcttgcctgaccggtaacccggttcgtgccgatgtggcaatgaccggtgagatcactctgcgtggtcaggtactgccgatcggtggtttgaaagaaaaactcctggcagcgcatcgcggcgggattaaaacagtgctaattccgttcgaaaataaacgcgatctggaagagattcctgacaacgtaattgccgatctggacattcatcctgtgaagcgcattgaggaagttctgactctggcgctgcaaaatgaaccgtctggtatgcaggttgtgactgcaaaataatgacctcgcgcaaaatgcactaataaaaacagggctggcaggctaattcgggcttgccagcctttttttgtctcgctaagttagatggcggatcgggcttgcccttattaaggggtgttgtaaggggatggctggcctgatataactgctgcgcgttcgtaccttgaaggattcaagtgcgatataaattataaagaggaagagaagagtgaataaatctcaattgatcgacaagattgctgcaggggctgatatctctaaagctgcggctggccgtgcgttagatgctattattgcttccgtaactgaatctctgaaagaaggggatgatgtagcactggtaggttttggtacttttgccgttaaagagcgtgctgcccgtactggccgcaacccgcagaccggtaaagagatcaccatcgctgctgctaaagtaccgagcttccgtgcaggtaaagcactgaaagacgcggtaaactaagcgttgtccccagtggggatgtgacgaagttcaagggcgcatctactgatgtgccttttttatttgtattcggtgactttctgcgtcttgtgggctgacaattgcccccgtttcttgtcacaataggcctttgcgcgcatcgatacgttgcgtgaggtacacagtcatctacagcggagtgttgttacaccatgatggacagcttacgcacggctgcaaacagtctcgtgctcaagattattttcggtatcattatcgtgagcttcatattgaccggcgtgagtggttacctgattggcggaggcaataactacgccgcaaaagtgaatgaccaggaaatcagccgtgggcaattcgagaacgccttcaacagcgagcgtaatcgcatgcagcaacagctgggcgatcaatactccgagctggcagcgaacgaaggctatatgaaaaccctgcgtcaacaggtgctgaatcgtctgatcgacgaggcgctgctggatcagtacgcacgtgagctgaaactgggtatcagcgatgagcaggttaaacaggcgattttcgcgaccccagccttccaggttgacggcaaatttgataacagccgctataacggtatcctcaaccagatggggatgaccgccgatcagtacgcccaggcgctgcgtaaccagctcactacccaacagctgattaacggcgttgccggtaccgattttatgctgaaaggtgaaaccgacgagctggcggcactggtcgcgcaacaacgcgtggtgcgtgaggcgactatcgatgttaacgcgctggcggcgaagcagcctgtgaccgaacaggagattgccagctactacgaacaaaacaaaaacaatttcatgacgccggaacaattccgcgtgagttacatcaagctggatgccgcaacgatgcagcaaccggttagcgatgcggatatccagagctactacgaccagcatcaggatcaattcacccagccgcagcgtacccgctacagcatcatccagaccaaaactgaagatgaagcgaaagcggtacttgatgagctgaataaaggcggtgattttgctgcattagccaaagaaaaatctgccgatattatctctgctcgtaacggcggcgatatgggttggttagaagatgccactatcccggacgaactgaaaaatgctggtctgaaagaaaaaggccaactgtctggtgtcatcaaatctagcgtcggtttcctgattgtacgtctggacgacattcagccagcgaaagtgaaaagcttagacgaagtacgtgacgacattgcggcgaaagtgaaacacgaaaaagccctcgatgcgtactacgcgctgcagcagaaagtgagcgatgcggcaagcaacgacaccgagtctctggccggtgcagagcaagctgccggcgttaaagccactcagacgggttggttcagcaaagataacctgccggaagagttgaacttcaagccggttgccgacgctatctttaacggcggtctggtaggtgaaaacggcgcgccgggcatcaactctgacatcatcaccgtagacggcgaccgcgcattcgtgctgcgcatcagcgagcacaaaccggaagcggtgaaaccgttggcagatgttcaggaacaagttaaggcattggttcagcacaacaaagctgaacaacaggcgaaagtggatgctgagaaactgctggttgatttgaaagccggcaaaggtgcggaagctatgcaggctgccggtctgaaatttggcgagccgaaaaccttaagccgttccggtcgtgacccgattagccaggcggcgtttgcactgccactgccagcgaaagacaaaccgagctacggtatggcgaccgatatgcaaggtaatgtggttctgctggcgctggatgaagtgaaacaaggtagtatgccggaagatcagaaaaaagcgatggtgcagggtatcacccagaacaacgcacaaatcgtctttgaagctctgatgagtaacctgcgtaaagaggcgaaaatcaaaattggcgatgcgctggaacagcaataatcctgaagccgcctcgcaaaaaaatgcgttgcagctgtaacaagaaaaggtcgctttcgcggccttttccatttctgaacattgccatttgtttactgttttcactgccgttaaggtgattccactgttaacaaacaaggagaaaacagtatgaaacacggaattaaagcactgctcattaccctgtccctggcctgtgccggaatgtctcatagcgcgctggcggcagcttctgtggcgaaaccgacggcggtagaaaccaaagcggaagctcctgcagcacaaagtaaagcagcagtaccggcgaaagccagtgacgaagaaggcacccgggtcagcattaataatgccagcgcggaagagctagcccgcgcgatgaatggcgttggcctgaagaaagcgcaggcgattgtcagttatcgcgaagagtacggtccgtttaaaactgtggaggatctaaagcaggtgccggggatgggcaatagcctggtggaacgtaatctggcggtattaaccctgtaattaatttgcatagtggcaattttttgccagactgaagaggtcataccagttatgacctctgtacttataacaacaacgtaaggttattgcgctatgcaaacacaaatcaaagttcgtggatatcatctcgacgtttaccagcacgtcaacaacgcccgctaccttgaatttctcgaagaagcccgctgggatgggttggaaaatagcgacagttttcagtggatgacggcccataacatcgccttcgtcgtggtcaatatcaatattaactatcgtcgcccagcggtattaagtgacctgttaactattaccagtcagttgcagcaattaaacggtaaaagcggcatcttaagccaggtcattacactggagccggaagggcaggtggtagcggatgcgcttattacgtttgtttgtattgatcttaaaacgcagaaagcattagctctggaaggggaattgcgcgaaaagctggagcagatggttaagtaaacgttttgtggtgccggatgctcaagccgcatccggcgacacccggaataattacctcaacccggttttctgcttcatcgctgccatcaccgtcggtttatcggccagataatgattcaaaccgttggcgcgtaaattacatgccgcacaatgaccgcaaccgtcgcctttaaagccgttatagcaggtcaacgtttcgttacggactaaatccagtttgccgtaataatctgccagcgcccaggtttccgctttatcaatccacatcagcggcgtttcaaaacgaatatctttcgccatgcccaaactgacggcatggtttagtgctttcacaaactcatcgcggcaatccgggtagccggagaaatccgtttcgcagacgccagtaattacggcttctgcttttacctgatacgcatatattgccgccagcgtcaggaacaaaatattacgccctgggacaaacgtattcgggataccatcggcttcaggttcataatcaggcaccggaatgctgtcacgcgtcaggctactgaccgccagctcgttgagcagggtgacatccagcaccttatgcgcgcgtgcccccagtttcagcgccagttcgcgtgccacgtcgatttctgcgcgatgccgctgaccgtaatcgaacgtcacgcaatggacttcatcatattgttgtaatgcctgcaccagacaggtggtggaatcctgacctccactgaacacaacgacagcacgtttcatagataatcctgcttgaacaataaaagcgttatggtaacgcctgcgattaacccggaccagctattcattggcttggcgcgggaagccaggcttcggtaaattcaaaccagccgcgcggtgtcagtcgcacaccgttcacgccgggaggggcactaatgcgatagtgatagttgaacagcggcgtcagcgtcgcatctgtcattaactggctaaaaaccgctttcagggcattaaatcggttttcttcatcaggcattatttgcacggcatccagtgtgctttgtagatgtgcgtatgctggagcgtcgaaaacatgtggccacagcggatcgcagcgcagccattgctccagagtatattccggtgcttcgccaattaatctgtcgcccatcatgaggtctgcgtgtgcctgtagggtcgtgtcgtcccagttttttgcgttatgaaaaataattgtgagttcacagccttccgctgccagtgtcgcctgtaggcgttctgccatggtatgaagttctatcggtaggtgataaaccagcgtcaaggttttcggtagtttgacttcatccggtacctgccaatgcggaatagtccagcctggcagtaatgcatgactggcggtgatcaggttttctccgacttctaacgtttgtaataaaccggattgatgaataatggagatcacttttcgcgcctgccagagggagagtcggggacttttgcgcaacgtcaaatagcaaaaacctaaactgatgccgctactgacctggctgacccgttgcagctcctccggtttgccgatggtgatttgcacgggatgccgacaactggttcccaaatctttttcgaaaagcggcggagttatccagtactcaaccgctttaagcagcggatgacgtaaatggtaataatcatggctttccaggcgcaccagctctgctgtgaattgtgttaagcgaaaaggacccgtgccgatcagtgggaattgcggatgcgccagatggctgcaatagctcgccagccggtgcgcaagccagtaatcagggcgatgtaaaaagaaggtcagacactgcggatgggtgacttcaatacgcttcacgctaataaataattgatccagtgctggcagttgtaacagcatcaataatcgctggtgtaagtgactggcttttactgcatcgccgttatgccagtgtagggtactacgaagataaaagtcccagcgtaacccgtcagtagaggtttcccagtgatgcgctaaatcgccaatcgggcgctgagtattattatcgaagcgggtcaggccggaaaatatctgcccggcgagatgctgctcggcacggccgggcaaaaagcctggttgtagcggttcgagcgggcgatagtagggaatacgcaacgtgggtgtatcgttttgccattgtccgcccataaacggctgtaacagagtgcgcagctcacctggggccagttgcgccagctccagcacatcttgctgctttccggtttccagtgcctgttccatcatcgcattgcgtaggctttccggcgtgaccagaaagcgtaattgtccgcgctttccgcgtccactctgcgcctgccactccagccatcccgcctcctgtgcctgacgcaacagcgtacgaacatggcgttcgctgcaaaaacagcgttcggccagttcgctgacggtgacggtttgcggctttccggcggaaggttgccacagacgttgatactggttaagacggttgagcaatcgcatataaacccggaacaatattatttaactattcactattacttccgtatatatcaggtgatactcaatcaccattaaccgtgtcacagagtggagaaagaaatggctcgtctggcagcatttgatatggatggcactttattgatgcccgaccatcatttaggtgagaaaaccctctctactttggcgcgactgcgtgaacgcgacattaccctcacttttgccacggggcgtcatgcgctggagatgcagcatattctcggggcgctaagcctggatgcgtatttgattaccggcaacggaacgcgcgtgcattctctggaaggtgaacttttacatcgtgatgatttacctgcggatgtcgcggagctggtgctgtatcagcaatgggatacccgagccagcatgcatatcttcaatgacgacggttggtttaccgggaaagagatccctgcgttgttgcaggcatttgtctatagcggttttcgttatcagataatcgatgtcaaaaaaatgccactcggcagcgtcaccaagatctgcttctgtggcgatcacgacgatcttacacgcttgcagatccagctatacgaagcattaggcgagcgtgcacatttgtgtttttccgccacggattgcctcgaagtgctgccggtgggctgcaataaaggcgctgcattgacggtgctgacccaacatttaggtttaagcttgcgcgattgcatggcctttggtgatgcgatgaacgatcgcgaaatgttagtcagcgtcggtagcggatttattatgggcaatgcgatgccgcaactgcgcgcggagctcccgcatttaccggtgattggacattgccgaaatcaggctgtctctcactatttgacgcactggctggactatccacatctaccttattcccccgaataacgagatcccttccagcaccgggcaattgcccggttttttttgcgttgaatttgtcattttgtgccgtggtgtttaaaccgcacagaataaattgtcgtgatttcacctttaaaataaaattaaaagagaaaaaaattctctgtggaagggctatgttagataaaattgaccgtaagctgctggccttactgcagcaggattgcaccctctctttgcaggcactggctgaagccgttaatctgacaaccaccccttgctggaagcgcctgaaacggctggaggacgacggtatccttatcggcaaagtcgccctgctggatccggaaaaaataggcctcggcctgaccgcttttgtgctgataaaaacgcaacatcacagcagcgaatggtattgccgctttgtcacggtggttaccgaaatgccagaagtgctggggttctggcgcatggctggtgaatacgattatctgatgcgcgtccaggttgccgacatgaaacgctacgacgagttttataagcgtctggtaaacagcgtgccggggctgagcgacgtcacttccagcttcgcgatggaacagattaaatacaccacttctttacccatcgaataaatatccagaatcaggtcaggacacaacgcgtgcgattatttgctcaattaagctggtatttccgtcgggaatggcgtcgctatctcggggctgtcgccttgcttgtcattatcgcgatgctgcaactggttccgccaaaagtggttggtattgttgtcgatggcgtgacagaacaacactttactaccgggcagatcctgatgtggatcgccaccatggtgctgattgccgttgtggtttatctcctgcgttacgtctggcgggtattgctgtttggtgcgtcttatcaactggctgttgaactgcgtgaagattattaccgtcagctaagccggcagcatcctgagttttacctgcgtcatcgcaccggtgacctcatggctcgtgcgaccaatgacgtcgatcgcgtcgtgtttgccgccggagaaggggtgctgacgctggtggatagtctggtgatgggctgcgctgtgttgattatgatgtctacgcaaattagctggcagttgaccttattttccctgttgccgatgccagtgatggcgatcatgattaagcgcaacggcgatgctttgcatgaacgctttaagctggcacaggcggcgttttccagtcttaatgaccgcacccaggaaagcctcaccagtatccgcatgatcaaagcctttggtctggaagatcgccagagcgcgttatttgccgcggatgccgaagataccggcaaaaaaaacatgcgggtggcgcgtattgatgctcgtttcgacccgaccatctatatcgcgattggtatggcgaacttgctggcgattggcggcggtagttggatggtggtgcagggcagtttaacgctgggccagctcaccagttttatgatgtatttaggtctgatgatttggccaatgctggcgctggcatggatgtttaacattgtggaacgtggtagtgctgcgtacagccgtattcgcgcgatgctggcggaagcgccggtggtgaacgatggtagcgaacccgtgccggaagggcgtggcgaactggatgtaaatattcaccagttcacgtatccgcagactgaccatcctgcgctggaaaacgtcaatttcgccctgaaacccggtcagatgctgggtatctgcgggccgactggttccggcaaaagtaccctgttgagcctcattcagcgtcatttcgacgtcagcgagggggatattcgctttcatgatattcctctgacgaagttacaactcgatagctggcgtagccgcctggcggtagttagccagacgccattccttttttctgacactgtggcgaataacatcgcgctgggttgcccgaatgccacccagcaagagattgagcatgtcgcgcggttagccagcgtacatgacgatattttgcgtctaccgcaaggttacgatacagaggtgggcgagcgcggtgtgatgctttccggcgggcaaaaacagcgtatctccattgctcgtgcgttattagtcaacgcggaaatcctcatccttgatgatgcgcttagcgcggtggacggacgcactgagcaccagatcctgcataacctgcgtcagtgggggcagggaagaacggtaatcatcagtgcccatcgcctttctgcactgacggaagccagtgaaattattgtgatgcagcacggacatatcgcccagcgtggcaatcatgatgtgctggcacaacaaagcggctggtatcgcgatatgtatcgctatcaacaactggaggcggcgctcgacgacgctccggaaaatcgcgaggaggccgtcgatgcgtaactaaaaatcgcgaggaggccgtcgatgcgtagttttagccaactgtggccgactctcaagcgcctgttagcgtacggtagcccgtggcgtaaaccgctggggattgcggtcctgatgatgtgggttgcggcggcggcagaagtcagtgggccgctgcttatcagctattttatcgacaatatggtagcgaaaaataacctgccgttgaaagtggttgcagggctggctgcggcgtatgttgggctgcaactgtttgccgccgggctacattacgcgcagagcctgctgtttaatcgggcggcagtaggcgtagtgcaacagttgcgtaccgacgtgatggatgctgcgttacgccagccattaagcgagtttgatacccaacccgtcgggcaggtgatttcccgcgtcactaatgacactgaagtgatccgcgatctctacgttaccgtagtggcaactgtcctgcgcagtgccgcgctggtgggcgcgatgctggtggcgatgttcagcctcgactggcgaatggcactggtggcgataatgattttcccggtggtgctggtggtaatggtgatataccagcgttacagcacgccgattgtccgtcgtgtgcgcgcctatttggcggatatcaacgacggctttaacgaaatcatcaatggcatgagcgttatccagcagtttcgtcagcaggcgcgatttggcgaacgtatgggggaggccagtcgtagtcactatatggcgaggatgcaaaccctgcgcctcgacggttttctgctgcgtccgctgctgagtctgtttagtagcctcattctttgtggcttgttgatgctgtttggcttctccgccagcggcaccattgaagtgggcgtgctgtatgcgtttatcagctatcttgggcgacttaacgaaccattaatcgaactgaccacgcaacaggcgatgctgcaacaggctgttgttgctggtgagcgcgtgtttgaactgatggacggaccgcgccagcaatatggcaatgatgatcgcccgttacagagtggcaccatcgaagtcgataacgtgagttttgcttatcgcgatgacaatctggtgctaaagaacattaatctctctgtgcctagccgcaattttgtggcgctggtcgggcataccggcagtggcaaaagcaccctcgccagtttattgatgggctattacccgctaacggaaggtgagattcgccttgatggtcgtccattaagtagcctaagtcacagcgcgctgcgccagggcgtggcaatggtgcagcaagatccggtggtgctggcggataccttcctcgccaacgtgacgctggggcgggatatctccgaagaacgcgtctggcaggcgctggaaaccgtgcaactggcggagctggcgcgtagcatgagcgacggtatttacacgccgctgggcgagcaggggaataatctcagtgttgggcaaaagcaactgctggcactggcgcgcgtgctggtcgagacgccgcaaatcctgatccttgatgaggcaaccgccagcattgactccggtactgaacaggcgattcaacatgctctggcggcggtgcgtgaacataccacgctggtagtgattgctcaccgcttaagcaccattgttgatgccgacaccattctggtgcttcatcgtgggcaagccgtggagcagggcactcaccagcaactgctggcggcccagggacgctactggcagatgtatcaactgcaacttgcgggcgaagagctggcagccagcgtgcgtgaagaggaaagtttgagcgcctgaatagcgcaatatttcatcgttggtgcaaaaatgtaacgcactgtgcactgtcatagtgcgttttcattttcaaacttcttaacttcctgctctctttctcgtttttcatttctggcacaccgcttgcaataccttcttcgtgtagcagaaccattaccgaattctgaccggaggggatctatgaagctggtgaccgtgataatcaaaccattcaagctggaagacgttcgtgaagcgttatcttccattggtattcagggcctgaccgtcaccgaagtgaaaggtttcgggcgtcagaaagggcatgccgagctgtaccggggggcggaatacagcgtcaatttcctgccaaaagtaaaaattgatgtggcgattgctgatgaccaactcgatgaagtgatcgatatcgtcagtaaggcggcttacaccggaaaaattggcgacggcaaaatcttcgtcgctgaattgcaacgcgtcattcgtattcgtaccggcgaagccgacgaagcggcgctgtaatctctggcacacagcaacaggaacgaaaaatgaagatagcgacgataaaaactgggcttgctagtctggcgatgcttccgggactggtaatggctgcacctgcggtggccgataaagccgacaatgcgtttatgatgatttgtactgcgctggtgctgtttatgactattccggggattgccctgttttacggtgggttgattcgcggcaaaaacgtgctgagcatgctgacgcaggtgacggtgacatttgcactggtctgtattctctgggtggtttacggttacagcctggcgtttggtgagggcaacaacttcttcggcaacattaactggttgatgctgaaaaacatcgaactgacggcggtgatgggcagcatttatcagtatatccacgtggcgtttcagggaagctttgcctgcattaccgtcggcttgatagttggggcgctggcggaacgaatccgcttcagtgctgtgttgattttcgtggtggtatggctgacgctctcttacattccgattgcgcatatggtgtggggcggtggtttgctggcttctcacggtgcgctggatttcgcgggtggcaccgtggtgcacattaacgccgcaatcgccggtctggtgggcgcgtatctgataggaaaacgcgtgggcttcggtaaagaggcgtttaaaccgcacaacctgccgatggtcttcaccgggactgccattctctatatcggttggtttggctttaacgccgggagtgcgggcacggcgaatgaaatcgcggcactggcatttgtgaatactgtggtcgcaacggcggcggcaattcttggctggatcttcggtgaatgggcgctgcgtggtaagcctagtctgctgggggcgtgttctggcgcgattgccggtctggtcggcgtgacgccagcctgcggctacattggggttggcggcgcgttgattatcggcgtggtagctggtctggcgggcttgtggggcgttaccatgctcaaacgcttgctgcgggtggatgatccctgcgatgtcttcggtgtgcacggcgtttgtggcattgtcggctgtatcatgaccgggatttttgccgccagcagcctgggcggcgtgggcttcgctgaaggtgtgacgatgggccatcagttgctggtacagctggaaagcatcgccattacgatcgtctggtccggtgttgtggcatttatcggctacaaattggcggatctgacggttggtctgcgtgtaccggaagagcaggagcgagaagggctggatgtcaacagccacggcgagaatgcctataacgcgtaacaagcactgcaaaaaacagccggacggttttcacctccggctatttttttaattgtgattacgcatcaccccttcctgaacggtgctggcaaccagtacgccgtcttgggtataaaactcaccgcgcacaaagccacgtgcgctggacgcgctggtgctctccacgctatacagcagccattcattcaaattaaacgggcgatggaaccacatggaatggtcaatggtggcaatctgaatccccggttcgagaaaaccgatgccgtgcggctgtagagctaccggcaggaagttaagatcagaagcgtaaccgagcagatactgatgaacgcgcaggtcatccggcacgctaccatttgcgcggatccacacctgacgatgtggttctgcgacgtgacctttcagtgggttatgaaactccaccggacggacttccagcggacgatcgcagatgaatttatctttcagcactggcggcagcaggtgcgccaggctttgggcgatttgcgtttcgctagggaggccatcaggcgctggcgcggacggcattgttttttgatgttcgaaacccgcttctggtgcctggaaagaggcagtcatataaaaaatcggtttgccgttttgaatagcagcaacccggcgggcgctgaagctgttaccgtcacgcagcgtttcgacatcataaataatcggcttcttactatcgccagggcgaagaaagtagctgtgaaagctatgtaccagccgctcttcagggacggtctcttttgcagcatacaaggcctgacccacgacctggccgccaaacacctggcgtaaacctaaatcttcactctggccgcgaaagagtccttcctcaattttttccagatttaacaatgtcagtaaattttttagcgcctgactcatataactctccagtaacaaagctgccgcagcaagccaaagtgagttgagtataacgcaaatttgctactggtccgatgggtgcaatggtctgaattacgggctaattacaggcagaaatgcgtgatgtgtgccacacttgttgacgttactattttgttaaccactcttccggcgaggaaagttagcccgctggtgcattgataataaggagaaatgaatgaaactcgtgcacatggccagtggtttagcggttgcgattgcgttggcggcttgcgcagataaaagcgcggatattcagacgccagcaccggctgcaaatacgtctattagtgcaacacaacaaccagctatccagcaaccgaatgtctccggtaccgtctggatccgtcagaaagtcgcactgccgcctgatgctgtgctgaccgtgacactttctgacgcgagcttagccgatgcaccgagtaaagtgctggcgcagaaagcggtgcgtactgaaggtaaacagagtccattcagctttgttctgagttttaacccggcagatgttcagccgaacgcgcgtattctgttgagtgcggcgattaccgtgaatgacaaactggtatttatcaccgataccgttcagccggtgatcaaccagggcggaactaaagccgacctgacattggtgccggtacagcaaaccgccgtgccggttcaggccagcggtggcgcaacgactaccgtacctagcactagtccaactcaggtgaatccgtctagcgcagttccagctcctacgcaatattaagcgacgttaaccctctccgcccggagagggttagtagttccagcgataacgctgcaagtcgatttgcccgcttccgcttaccatcacaccttctgccagtaatgcctgtcgctgacgctgtaaatccggtccggttaggctaattgtgccgtggcgattaaccacccggtgccagggtaaggtgctgccttcagggagacgctttaacacaccgcccacctggcgcgcggcgcgggggcttcccgccagtttcgccacatcaccgtaagtggtgacatagccttcgggaatagcggcgacgatttgccagacgcgttggggaaaactatcttctttttccatcttttcttcctgaggtaatttttcagcataatctggaaaaacgccgctgtgaagtcgcattgcgcaagaaaccagcatctggcacgcgatgggttgcaattagccggggcagcagtgataatgcgcctgcgcgttggttctcaacgctctcaatgggggctctgttggttctcccgcaacgctactctgtttaccaggtcaggtccggaaggaagcagccaaggcagatgacgcgtgtgccgggatgtagctggcagggcccccacccatttctgcctcccaccgtttcgtcaaaaaatcccaacatggctaaactttaaccacaactgacgtcgcaagaattgtctggctgcgcagtacgcttcggaggtatgtctgatgaagtatgttgatggttttgtggttgccgttcctgccgataaaaaggatgcctatcgggaaatggccgctaaggctgcgccattgtttaaagagtttggcgcgcttcgtattgtcgaatgctgggccagcgatgtaccggatggcaaagtgaccgattttcgtatggcggtgaaagcggaagagaatgaagaggttgtctttagctggattgaataccctagtaaagaggtccgcgacgctgctaatcaaaagatgatgagcgacccacggatgaaagagttcggcgagtccatgccgtttgacggcaagcgaatgatctatggcggattcgagagtatcatcgacgaataagtagcgtgacgggctgtgcggcgtgccgtcagcccaaaaattcacaaatgttgctcggcccagcgtaagaaatcttctttcggtaatgccttgctgtagagccagccctgaccgtagtgcacgccatgctggcgtaaccactcttcttgtttactggtttcgattccctccgctaccattttcagtttcagtgtttttgccatttcgatgatatgcggcgtgacatttttatattccagcgcatcaacgaaagatttatcgatcttcagaatgtcgacatccagatcctgtaaataacttaaactactataccccgtaccaaaatcatcaagataaatttcatggcccgcctcccggtagcgagaaattatcggggcgctggttttcggatcggcaaactcgcgttcagtgagttcaagcgcgatctgtctgggattaacctgatagtgattgatcatgtcacgcagcaattgcgggattttttcgctggtgagcacgggggattcaagattgatgctaatatgctgctgtggatgctgacgcagccagtcgcccatatcttcaaagacgcttcttataatcagtagcgtcaatggctcagaaaggcccgtttgctgtgccagcggaataaaactatctggactcaaccaactaccgtctgtctgcggccagcgcgccagtgcctcagcaccgacaattttgccattggctaaggagacaatcggctgatagtgcacgcaaatatcacgattttcgatagcatcctgcagccgatgatgcggactctgaatacggcgcaaaatacgcagcacaaacatcgctgccagcaggccaatcaccaacccgagcggtaaccaaataaagacttgccgatgccagcctttctgcaacattttcgtactagcccatgtgatgatgctaatattcatctccggtaagggcaggatatcgtaaatgattccattattttcgatatgctcaccgggtgttttttgtagcctggtaataattccctgagcaatttcatcgctgctggttatgacaacgttatgggcattgccaataatggcggcatcaatttgccaactgctatagggaatgacatcaataaaggaagcggggtcgatcatgacgacataatgtgccgttcccatggcgaccatgtaacggataatgcctaaatcgttatggcttgttaaccagacacgataaccatctttgctaattttacctggctcggggaaggtatcgggcggactttcatgctccagagagctacactggggaacgttgttatcgatataagccacttcctgaatatagcgataactgtaagatacccgacgcatttccatgagatgggcttcgctacaggcagcgccttgccatctttccagctcctgcagcgcatctttcccttgtgtcgccaccttattggctcgaatagcgacgcgggaggaataggtatccagctcttcaataaagcttgtttctacctgctgatgggccagccagatgcttaagccgacaggcagcaatacactaagaatcagtactccgctaataaggccgaccagatgtcgtgttctcaccagcatatccttattaacacagtgtagggaaagtatatctgattgtggaaaaaggctggctggagataaggaggtagagctggtatttcatgaagtgatgggtggaaacgatcattgtcatttgaccaggcgcagagctttacgcctggtatgtaaccctaacttaagatgtactttcggcgcgagcgagggtaaaaatatcgtaaaaagacagttcacctttacggacgatcattttttgcagttgttccttatgaacatccgcgacacgcggagagttcaagatggcttcaaccagcgcggcaggtacaaagcgcgtgttgtaccattcgccgttatagcaaacgcggaaatccagcacgtcgatatcttcatagcggtagcgtgggtagacatcgaaaaagaagaaaccattaagcaggataaataatacaaccagtagccagacagagccactcagcgtttcggactgcaacatcaccgccagggtggcaaaaaaagcaacgtacataccgataaacagccccggatgtttacggataaaactgatactaaagcggggtttgttgtcgcgtttttcgcgggtattcagagactcaatcgtttcggtcagcaggcgttgtatttcggtcatcgtttgccttcgtggtatctgcaactttccagggaacaccctattttaacgtgggaatagtagaggggaagtaacagatctaccacaattttgcataacagttgcgaaaaaccgattacaattttttaattattctggctggattaccgcccacgacaacgttgtccgggacatcttttgtgacaactgcaccactggctaccacgacgttatcaccaatggtcacaccagggttaatgaccgcgcgtccgccaatccagacgttattaccgatggtgacgggtttccccagttcagcaccgctattacgtgctacagggtcgatgggatgtgttgccgtgtagatatgaacgcctggtgccaacatacagttatcaccgatgcgaatagggcagacatcaagcatcacgcaatcgaagttggcgaaaaaattattaccgagaaaaatgttatagccatagtcacagcgaaacgttggctcaatataagcctctgtcacctgaccgaatagatcagcgagaatttgctggcgtaatgtgtgctcttccgccagggaatgattgtatcggtgaataagctgacgagcgcgcaggcgatcgcgagataacgtctcatctgcgctgcgatacaactcaccagcaatcatcttttctttttctgtgctcattactgacctccggttgctgaaaatgcggcaacacagtaagacgaaaagtcagtgaagagaacgttcccattacatctgtgtgataaagatcacatagggtatgtcttcatggcgaaaaagtataaaattcttaataaacagccggttatagctccgaaagcgaattatttattagcgaataaatttccatacactggaagggatcttgtcgtacagtttattcatggtcaattcggcgaggcggtgatctgcggcactgtaaaataccgccagttcattatcacttaattcgtatttatttttctcgataacacgctccagcgtgtcaattgtctggcaacgacgtaaacgcattaaataatcggttttcgttaaaggtttttcggacatacttctacctatggttgtaataattttaacaagataaactcgcaggattctctttcgtcgcattgacaaaacaacggaatagtcgattaccactcttccgccatttctgaagatcctgcatattaataccataactactgaacaacataaaggtgtcatccagatattcgtcgatctgctcaatgagcttattgtcttcattatacttaattttgtaattaagtgcgaaggtcgcaatatgctcaatcagttcattcaactggaggttgatcgcgctggttgggtcgtttacccagccatgattgctttcttcaaggtttgcaaggcagtcatgatacagggtttcacagagaaacttaagctgtgcgatatcatgtcttttgggactgtattcatccataacgcgtccccttcttagcggttgaactaacggacacctttcgggatggaaaaaacttactgacctggacttgccctctcgtttgttagcttaactataagccactctttgcaggttttcatcgcattattacgaaaaattacaattaggaaggaagcgggacaggactcactttttcatactagcactaacccgcagcaggtaaaagcagtttgctcgaactattcataacatttcaggattatcgccagatgaaattggtgacactaataccaggattgctctgaatatgacgtaataaccgaggaatgaataaagaattaccgcaaataattaagaatagcctctaaatgattatggattattaaatctattagcgctacttaatataaattaactaacaatcagtattttttatgaattttatccgtggttaatactggttttcgtatgagatcctgagttggtggttcaattactccttaatgttcgtaggttatgcataaaaaaggccgcttacgcggccttagtgattacacgttgtatcaatgatgatcgacagtatggctgtgctcgatatcttcattcttgcggctaaagcggcggcgaaccaccacaaagaataccggaacgaagaagattgccagtaccgttgcggtcaccatcccgcccattacaccggtacctactgcgttctgcgcgccggaaccagcaccagtactgataaccagcggcataacgccgaggataaacgccaggctggtcatcaggatcggacgtaaacgcatccgcaccgcatcaagcgtcgcttcaatcagacctttaccttctttatccatcaagtctttggcgaattcgacgataaggatcgcgttcttcgcgctcaacccaatggttgtgagcaggcctacctggaagtaaacgtcattggtcaggccacggaaggtggcagccagcaacgcaccgataacccccagcggaacgaccagcataacggagaacggaatgctccagctctcgtacagcgccgccagacacaggaacacgacaatcaagctaatcgcgtacagactaggtgcctggttgccggagagacgttcctgataggacatccccgtccagtcatagccaacaccggtaggcagtttgctcgccagttgttccatcagctccattgcttcaccggtacttttacccggtgccgcctggcctaagatttccatggatggcaggccgttgtaacgttccagacgcgggctaccgtactcccaacgagaagaggagaacgcgctgaatggcaccatctgaccatcagcagcacgaacataccagtcgccgatatcatccggcagcatacggtatttcgcttcactcatgacataaactttcttcacacgaccgcggtcgataaagtcgttcacatagctgccgccccatgcagcgcccagagtggtgttaatgtcgttgatagaaacacccagcgcctgcgctttttcctggtcgatatcaatcttaaactgcggggtatcttccagaccgtttggacgtacgctggtcaacatatcagggtgcttcgctgcttctgcaagcaactggttacgcgcctgagtcagtttttcgtgaccaaggccagcctggtcaatcagctcaaagtcaaagccggttgcagtacccagttccacgattgcgggcaggttaaaggcgaaaaccatcgcatctttgatttggctgaaagcgcgtgttgcacgcatggtaatcgcttcaactttgttttcttcgcccggacgatcggcccagtccttcaaggaaacgaacgcaataccggtattctgaccacgtcccgcaaagccgaagccgttaacggcgaacacgctctcaacgttgttcttttctttggtcagatagtaatgcgttacctcattgagcactttctgtgtacgttcctgcgttgcacctgctggcagctgaaccatggtcataaacacgccctggtcctcatctggcaagaaggagcttggcagacgcacgaacagataggccatgccgaccacgatgatcagatacagcaccaggtaacgccccgtactgcgcagaataccgcctacgctgtcggtgtagtggtgcgtgctcttctcgaacatgcggttaaaccagccgaagaagccttttttaccttccccgtgatcgcctttggcaatcggtttcagcatggtggcacaaagagctggagtcaggatcaacgccaccagtacgctcagcgccattgcactaacaatggtaatagagaactgacgatagatagcaccagtagaaccgccaaagaaggccatcggtacgaataccgcgctcagtaccatcgcgataccgaccagagcgccctgaatctgccccatgctcttacgggtagcttcttttggcggcaaaccttcttccgccataacacgctcaacgttttctaccacaacgatggcgtcatccaccaacaggccgatggcgagcaccatcccgaacattgttagcgtgtttatgctgaagccaaaggcggcaaggacggcaaaggtcccgagcaataccaccggtacggcaatggtcggaatcaacgtcgcgcggaagttctgcaggaacagatacataaccaggaacacgaggatgatcgcttcgaccagcgttttaaccacttcgtgaatagagattttcacgaacggcgtggtgtcgtatgggtaaacaattttcagaccgctcgggaagaacggttccatcttcgccagttcagcacggattgccgcagcggtatccagcgcgtttgcaccggtcgccagcttgatccccagaccggaagccggttggccgttaaactctgcgatgatgtcgtagttctcaccacccagctcaatcttcgcgacgtcacgcagcagcacgcgggaaccatcctgattcactttcagcaggattttgccgaactcttcagtagaggtcagacgcgtctgagcaataatagaggcgttaagctgttggcctttcaccggcggcgtaccaccgagctgacccgccgcaacctgggcgttctgcgctttgatggcggtaatgacatcaaccggcgttagctggaatttgttcagctcattcgggttcatccagatacgcatcgcgtactgactaccgaacaactgaacatcacccacgccgctcgtacggctgatggcatctttcatattcgccgccacgtagtcggagatatcctcctgcgtcatggtgccatcggtgttgataacgccgacaaccatcaggaagctgctggaacttttctcaacgctcaccccttgctgctgaacttcttgcggcagcaacggcatcgccagctgcagtttgttctgcacctgaacctgcgcgatatccgcatcagtaccagactcaaaggtcagggtgatctgcacggtacccgtggagtcactgttagaggacatgtacatcaggttatcgataccgttcatattctgttcgataacctgtgtcaccgtgtcctgcactgttttcgcatcagcgccggggtaggaggcggagatcgttactgccggcggtgcaatcgtaggatattgcgccaccggcagtttgaggatcgccagcccccctgccaacatgatgataatggcgatcacccacgcaaaaatcgggcgatcgataaagaaattaggcatgtcttaacggctcctgtttaagttaagacttggactgttcaggctgagcaccgcttgcggcttgctggttattatcagcggtaacttcttgtgcttttacctggacaccaggacgcactttctgcagcccacttattactacgcgatcgcctgctttcagaccttctgtcaccagccacttatcgccaatagcctggcttgcaacgatcggacgggtttccactttgtcatccgcgccaactaccagtacggtggcatcgccacgcggcgtacgggttacgccctgttgcgggactaaaatagcgtttggattaagcccttcttccagacgtgcgcgcacgaacatacccggcagcagagtgtgatccgggttcgggaagatagcgcgtagggtgatagacccagtggtctgatcaacggtaacgtcagagaattccagcgtaccgtcctgcgggaacttaatgccgtcactggtgatcagactcactttggctttgccgttctcttgtttcagcgtgccattcgccagttcctgtttcaggcgcaggaagtcgttgctggactgggtcacatcaacgtagatcggatcaagttgctgcacggttgccagcgcagtcgcctgaccgttctgtaccaatgcgccttccgtcacgttgctcttaccaatgcgaccgctaatcggagaggtgactttggtgtaagccagattgatccgcgcagtttcaacggcagctttcgccgcagttaccgcagcattcgcctgttgcgcatcagccagagcctgatcgtactcttgcttactgatgtactgagtaccgagcagtttctgataacgattcaccgtcaattgcgcgatattggctgcagcctgggctttcgccagatcacctttcgcactgtcgtatgtcgcctgataggtcgcaggatcaatctgatagagagagacacctgcttcgatgtcgctaccttctttgaaattacgcttcaggataatcccgctaacttgaggacgaacttctgcgatccggtaggcactggtgcgacccggaagctcggttgtgatctgcagaggttcagttttgactgttactacgccaacggcgggcatctgctggccaccttgttgggcctgtttgtcgtcacatcctgttagggctaagctgccactgagcatcagaacgaccgccagaggcgtaaaccctctgtttttgttcatatgtaaacctcgagtgtccgatttcaaattggtcaatggtcaaaagttaataaacccattgctgcgtttatattatcgtcgtgctatggtacatacattcacaaatgtatgtaaatctaacgcctgtaaattcacgaacatatggcacgaaaaaccaaacaagaagcgcaagaaacgcgccaacacatcctcgatgtggctctacgtcttttcagtcagcagggggtaagttccaccagcctgggcgagattgcaaaagcagctggcgttacgcgcggtgcaatctactggcattttaaagacaagagcgatttgttcagtgagatctgggaactgagtgaatccaatattggtgaactagagcttgagtatcaggcaaaattccctggcgatccactcagtgtattaagagagatattaattcatgttcttgaatccacggtgacagaagaacggcgtcgattattgatggagattatattccacaaatgcgaatttgtcggagaaatggctgttgtgcaacaggcacaacgtaatctctgtctggaaagttatgaccgtatagaacaaacgttaaaacattgtattgaagcgaaaatgttgcctgcggatttaatgacgcgtcgcgcagcaattattatgcgcggctatatttccggcctgatggaaaactggctctttgccccgcaatcttttgatcttaaaaaagaagcccgcgattacgttgccatcttactggagatgtatctcctgtgccccacgcttcgtaatcctgccactaacgaataaccctgaatctgactccaggatttttcctggacattttcgtcgttgctattctggttcactgcgtcgtgatattcttgcggtttgactttttcaggtcgttcttcaggttcagaaaccttcattcatcatgactatgttccagtattacaaacgaagtcggcattttgtttttagtgcatttattgcttttgtttttgtcttgttatgccagaacacggcgtttgcgcgggcgagtagcaatggtgatctgccgacaaaagcggacctgcaggcgcaacttgacagtctaaataaacaaaaagatctttctgctcaggacaaactggtgcagcaggatctgacagatacattagccaccctcgataaaatcgatcgcataaaagaagagacagttcagctacggcaaaaagtcgctgaagcgccggaaaaaatgcgccaggcgaccgcggcgttaacagcacttagcgatgtcgataacgacgaagaaacgcgcaaaattctgagcacgctgagcttgcgccagctggaaactcgcgttgcccaggcgctggacgatttgcaaaacgcacaaaacgatctggcgtcttataacagccagctggttagcttacagacgcagcccgaacgcgtgcaaaatgcgatgtataacgctagccagcagctgcaacaaattcgcagtcgtctggatgggactgatgtcggcgagacagccttacgtcccagccagaaagtgttaatgcaggcccagcaggcgttgctgaatgcggagattgaccagcagcgtaaaagcctggaagggaacaccgtcttgcaggataccttgcaaaagcaacgtgattacgtgacggcgaacagcgctcgtctggagcaccagttacaactgttgcaagaagcggtaaacagcaagcgcctgactttaaccgaaaaaacggcgcaggaagccgtctccccggatgaagccgcgcgtattcaggctaatccgctggtgaagcaggaactggaaattaaccagcagttaagtcagcgtctgattaccgcgactgaaaacggtaatcagttgatgcagcaaaacattaaagtcaaaaactggctggagcgggcgctgcaaagcgaacgcaatattaaagagcagattgccgtcctgaagggcagcctgctgttgtctcgtatcctttaccagcaacaacaaacgctgcccagcgcggatgaactggaaaacatgaccaaccgcatcgcggatttgcgtctcgaacagtttgaagttaaccagcagcgtgatgcactcttccagagcgatgcgttcgtcaacaaactggaagaaggtcacaccaacgaagtcaacagcgaagttcacgatgcgttattgcaagtggttgatatgcgtcgcgaattgctggatcaactcaacaaacagttgggtaaccagctgatgatggccattaacctgcaaatcaaccagcagcagttaatgagtgtgagcaaaaacctgaaatccatcctgactcagcaaatcttttgggtgaacagtaaccgtccaatggactgggactggatcaaagcgttcccgcaaagcctgaaagatgaatttaagagcatgaaaatcacggtgaactggcaaaaagcctggcccgccgtttttatcgctttcctcgctggtttgccgctgctgttgattgccgggctgatccactggcgtctgggctggctgaaagcgtatcaacaaaaactggcttccgctgtgggttccctgcgtaacgacagccagctcaacacaccaaaagcgatccttatcgacctgatccgtgcgctgccggtgtgcctgattattctcgcggttggcctgattctgttgaccatgcagctcaacatcagcgaactgctatggagcttcagcaaaaaactggcgatattctggctggtgtttggcctgtgctggaaggtactggagaaaaacggcgttgccgtacgtcacttcggcatgccggaacagcagaccagccactggcgtcggcaaattgtccgcatcagtctcgcattgctgcctatccatttctggtctgtggtggcagaactttccccgctgcatctgatggatgatgtgctggggcaagcgatgattttcttcaacctgctgctgattgccttcctggtatggccgatgtgccgcgaaagctggcgtgataaagagagccacaccatgcgactggtcaccattaccgtgctgagcataatcccgattgcgctgatggtgctgactgctacaggctacttctacactacgctgcgtctggcaggacgctggattgaaaccgtttatctggtgatcatctggaacctgctgtaccagacggtactgcgtggcttaagcgtagcggcgcggcgtatcgcctggcgtcgtgcgctggcgcgtcggcagaatctggtgaaagagggcgcagaaggtgctgaaccgccggaagaacccaccattgcactggagcaagttaaccagcagacgctgcgtattaccatgttgctgatgtttgcgctgttcggtgtcatgttctgggcaatttggtccgatttgatcaccgtgttcagctatctcgacagcatcacgctctggcattacaacggcactgaagctggcgctgcggtggtgaaaaacgtcaccatgggcagtctgttgtttgcgattatcgccagtatggtggcctgggcgttgattcgcaacctgcctggtttactggaagtgctggtgctcagccgactgaatatgcgccagggcgcgagctatgccattactaccatccttaactacatcattattgctgttggtgcgatgacggtgttcggaagcctgggcgtctcttgggataaactccagtggctggccgcagcattatccgtaggtcttggttttggtttacaagaaattttcggtaacttcgtctccggtttgatcattctattcgaacgtccggtgcgtattggcgatacggtaaccattggtagcttcagcgggacggtaagtaagatccgtattcgtgcgacaacgattaccgatttcgatcgcaaagaagtgatcatcccgaacaaagcgtttgttaccgagcgtctgatcaactggagcttgactgacactactacgcgtctggtgatccgtctcggcgtggcctatggctccgatctggaaaaagtgcgtaaagtgttactgaaggcggcgactgagcacccaagggtgatgcacgaaccaatgccggaagtcttctttacggcatttggtgccagcacgttggatcatgagctgcgtctgtatgtgcgtgaactgcgtgaccgtagtcgtactgtcgatgagctgaaccgtactatcgatcagctgtgccgtgaaaacgacatcaacattgcctttaaccagcttgaagtgcatctgcacaacgagaagggcgatgaggtgacggaagtaaaacgcgactacaaaggcgatgacccgacgccagcggtagggtaaaaacgaaagggggcaacatttagttgccccgagattgctaacaaagtgcgcgttgttcatgccggatgcggcgtgaccgccttatccggcctacgaaaccgcaagaattcaatatattgcaggagcggtgtaggcctgataagcgtagcgcatcaggcagttttgcgtttgcccgcaaccttaggggacatttagcgaccccatttatttctcacttttccgcctcatcatcgcgcgttaatttcttttcataatcacgctttacaatatccagcgcgcgcagcacggtactggcagggatctgattttcctccagcagcacaatcaaatcgacagccagtttgacatcgtcaggggcattttccagactcatattctctccattgttagcgggttaaacgcgctaacctgttttcgattttttccagcgcatggcggcagcgtgccaggcgcgcttcataggcttccacttcacgatgcagcgtttgctgttccacgagatcggtcacccgcgccagacgggctctgcgttcggcaaccatctcacgtagccgccgctcaaaatcctgatgctgaatacgtttacgctgccagcgggcaattttcggtggtgcactgtcccactcgcgcaaactccaggcggaggcttcacgcgcgatggcttccagttgtgccgccagatgttccgccagccaggccacttgcggcagctgttgctgctcaactgcatgacgaagcgcagccagattatcgcccgcctcgtcgagacaagcctgtagtgttgtcgcacgagtctgaaaaagatgcctgtcgaaacgagcacttagcgtggcgaactgactcaccggggcacaacgctgacgcagcgtagcgagctgtccttccagtttttccagcagcagggcggttttcacgataagacctcaatgaaaatgataattgttatgctaaagtagccactctgtaagctgacaacactcaatatgcaacgaatcattttaatcatcattggctggctggcggtagtgctgggtacgctgggcgtggtattaccggtattaccgacgacgccgtttatcctgctggcggcctggtgctttgcccgttcttccccgcgctttcacgcctggttgctgtaccgcagttggtttggcagctatctacgtttctggcagaaacatcatgcgatgccgcgcggcgtcaaaccgcgggcgattttgcttattttgctcacgtttgccatttctctgtggttcgtccagatgccatgggtgcgcatcatgttgctggtaattctcgcctgtttgcttttctatatgtggcgaattccggtgattgatgaaaagcaagaaaagcactgaagcacaacaatcgcagttgcaattattgcgtacagccagtacattctggcgttttcgagcacaggcgcaggcggtcaaaggttaaacaactgttacttttgatacgtttaaaacgcgccgtgagtaccaccgtaacaagcaggcatacacttatgaccgcgactgcacagcagcttgagtatctcaaaaatagcatcaaaagcattcaggactacccaaaacccggcattcttttccgcgatgtcaccagcttactggaagacccgaaagcttacgctctcagcatcgacttgctggttgagcgttacaaaaatgcgggcattaccaaagttgtcggcaccgaagcgcgtggcttcttgtttggcgctccggtagctctgggtctgggcgttggctttgtaccggtccgtaaaccgggcaaactgccgcgtgaaaccatcagtgaaacttacgacctggaatacggcaccgatcagctggagatccacgttgatgccatcaaaccgggcgacaaagttctggtggtggacgacctgctggcaaccggcggcactatcgaagcgaccgttaaactgatccgtcgtctgggtggtgaagtggctgacgctgcgttcattatcaacctgttcgatctcggcggcgaacagcgtctcgaaaaacagggcattaccagctacagccttgtcccgttcccgggccattaattatcgccagtcttgtgctgcccacgctacggacagcacaagatgtgcattcagcctcgccgttctgacggggctgtgttagcattaccccttcgtgaatccaccttccagcgtttcagagcctgccaatgagttatcaggtcttagcccgaaaatggcgcccacaaacctttgctgacgtcgtcggccaggaacatgtgctgaccgcactggcgaacggcttgagcttagggcgtattcatcatgcttatcttttttccggcacccgtggcgtcggaaaaacctctatcgcccgactgctggcgaaggggctaaactgcgaaaccggcattaccgcgacgccgtgcggcgtgtgcgataactgtcgtgaaatcgagcaggggcgctttgtcgatctgattgaaatcgacgccgccagccgcaccaaagttgaagatacccgcgacctgctggataacgtccagtacgctccggcgcgtggtcgtttcaaagtttatctgatcgacgaagtgcatatgctgagccgccacagctttaacgcactgttaaaaacccttgaagagccgccggagcacgttaagtttctgctggcgacgaccgatccacagaaattgccggtgacgattttgagtcgctgtctgcaatttcatctcaaggcgctggatgtcgagcaaattcgccatcagcttgagcacatcctcaacgaagaacatatcgctcacgagccgcgggcgctgcaattgctggcacgcgccgctgaaggcagcctgcgagatgccttaagtctgaccgaccaggcgattgccagcggtgacggccaggttagtacccaggcggtcagtgcgatgctgggtacgcttgacgacgatcaggcgctgagcctggttgaagcgatggtcgaggccaacggcgagcgcgtaatggcgctgattaatgaagccgctgcccgtggtatcgagtgggaagcgttgctggtggaaatgctcggcctgttgcatcgtattgcgatggtacaacttagccctgctgcacttggcaacgacatggccgccatcgagctgcggatgcgtgaactggcgcgcaccataccgccgacggatattcagctttactatcagacgctgttgattggtcgcaaagaattaccgtatgcgccggaccgtcgcatgggcgttgagatgacgctgctgcgcgcgctggcattccatccgcgtatgccgctgcctgagccagaagtgccacgacagtcctttgcacccgtcgcgccaacggcagtaatgacgccaacccaggtgccgccgcaaccgcaaagtgcgccgcagcaggcaccgactgtaccgctcccggaaaccaccagccaggtgctggcggcgcgccagcagttgcagcgcgtgcagggagcaaccaaagcaaaaaagagtgaaccggcagccgctacccgcgcgcggccggtgaataacgctgcgctggaaagactggctagcgtcaccgatcgcgttcaggcgcgtccggtgccaagcgcgctggaaaaagcgccagccaaaaaagaagcgtatcgctggaaggcgaccactccggtgatgcagcaaaaagaagtggtcgccacgccgaaggcgctgaaaaaagcgctggaacatgaaaaaacgccggaactggcggcgaagctagcggcagaagccattgagcgcgacccgtgggcggcacaggtgagccaacttagcctaccaaaactggtcgaacaggtggcgttaaatgcctggaaagaggagagcgacaacgcagtatgtctgcatttgcgctcctctcagcggcatttgaacaaccgcggtgcacagcaaaaactggctgaagcgttgagcatgttaaaaggtagtacggttgaactgactatcgttgaagatgataatcccgcggtgcgtacgccgctggagtggcgtcaggcgatatacgaagaaaaacttgcgcaggcgcgcgagtccattattgcggataataatattcagaccctgcgtcggttcttcgatgcggagctggatgaagaaagtatccgccccatttgatcgtaagcacagcttacgttcgtcatccttaacgtgattgagagagaaacctatgtttggtaaaggcggtctgggtaacctgatgaagcaagcccagcagatgcaagaaaaaatgcagaaaatgcaggaagagatcgcgcagctggaagtcaccggcgaatctggcgcaggtctggtaaaagtgaccatcaacggtgcacacaactgccgtcgcgtagagatcgacccgagcctgctggaagacgacaaagagatgctggaagacctggtggctgcagcattcaacgacgcagcacgtcgtattgaagaaacgcagaaagaaaaaatggcctctgtatcctccggaatgcagctgccgcctggctttaagatgccgttctgatgcaaaccagcccgctgttaacacagcttatggaagcactgcgctgtctgccgggcgttggcccgaagagcgcgcagcgtatggcgttcacgctgcttcagcgcgatcgtagcggcgggatgcgtctggcgcaggcgctcacccgggcgatgagcgaaatcggccactgcgccgattgccgcactttcaccgaacaggaagtctgtaacatctgtagcaatccgcgtcgtcaggaaaacggtcaaatctgcgtggtggagagtccggcggacatctacgccattgagcagacggggcagtttagtggtcgttattttgtgttgatggggcatctgagtccgctggacggcatcggtccggatgatatcgggcttgatcgtctggaacagcgtctggcagaggaaaaaatcactgaagtgatcctcgccaccaaccccacggttgaaggtgaagctaccgctaactacattgccgagctttgcgcgcaatatgacgtggaagccagccgaatcgctcatggcgttccggttggcggcgagctggaaatggtcgacggcaccacgttgagtcactcccttgccgggcgtcataagattcgtttttaagcaaacgagagcaggatcacctgctctcgcttgaaattattctcccttgtccccatctctcccacatcctgtttttaaccttaaaatggcattattgaggtagacctacatgaaaggacaagaaactcgtggttttcagagtgaagtgaaacagcttctgcacctgatgatccattctctctattccaataaagaaatcttcctgcgtgagcttatctctaacgcctccgatgcggcggacaagctgcgtttccgtgcgctctctaacccggacctgtacgaaggtgatggcgaactacgcgttcgtgtctctttcgataaagacaagcgtacgctgaccatctccgataacggcgtggggatgacccgcgacgaagtgattgaccatctggggactatcgctaaatccggtaccaaaagtttcctcgaatccctgggttctgaccaggcgaaagacagccagctgatcggtcagtttggtgttggtttctactctgcgtttatcgtggccgacaaagtgaccgtgcgtactcgcgcggcaggcgaaaaaccagaaaatggcgtcttctgggaaagcgctggcgaaggtgaatacaccgttgccgacatcaccaaagaagatcgtggtactgaaatcaccctgcatctgcgtgaaggcgaagacgagttcctcgatgactggcgcgtgcgttccatcatcagcaaatactccgaccatatcgcgctgccggtagagatcgaaaaacgcgaagagaaagacggcgaaaccgttatctcctgggagaaaatcaacaaagcgcaggcgctgtggactcgtaacaagagcgaaatcaccgatgaagagtacaaagagttctacaaacacatcgcccacgactttaatgatccgctgacctggagccacaaccgtgttgaaggtaagcaggagtacaccagcctgctgtacatcccgtcccaggctccgtgggatatgtggaaccgcgatcataaacacggcctgaaactgtatgttcagcgtgtgttcatcatggacgacgcagaacagttcatgccgaactatctgcgcttcgtgcgtggtctgattgactccagcgatctgccgctgaacgtttcccgtgaaatcctccaggacagcacggtaacgcgtaacctgcgcaatgcgctgaccaagcgtgtgctgcaaatgctggaaaaactggcgaaagacgacgcggaaaaataccagaccttctggcaacagtttggcctggtactgaaagaaggtccggcggaagatttcgctaaccaggaagcgatcgccaaactgctgcgttttgcttctacccataccgattcttctgcgcagaccgtatctctggaagactacgtttcccgcatgaaagaagggcaggagaaaatctactacatcaccgcagacagctatgcggcagcgaagagcagcccgcacctggaactgctgcgtaagaaaggcatcgaagttctgctgctttccgaccgcatcgatgagtggatgatgaactatctgactgagttcgacggtaaaccgttccagagcgtgtctaaagttgacgagagccttgaaaaactggctgacgaagttgatgagagcgcgaaagaagcggagaaagcactgactccgttcatcgaccgtgtgaaagccctgctcggcgagcgcgtgaaagatgtccgtctgactcaccgtctgaccgatacgccagcgatcgttagcaccgacgcggacgaaatgagcactcagatggcgaaactgttcgctgcggcgggccagaaagtgccagaagtgaaatacatcttcgaactgaacccggatcacgtactggtgaaacgtgcggcagatactgaagatgaagcgaagttcagcgagtgggtagaactgctgctggatcaggcgctgctggcagaacgcggcacgctggaagatccgaacctgtttattcgtcgtatgaaccagctgctggtttcctgatgtaatgccggatgaccttcgtgtcatccggcatttttcttttcatcatctgcactttccgcaaattatctcgccattaaccgtttcagccccaggtgcctttcttgaggcaatcgcctgttggtggtatcgtttatcgctttttcaaaaaattcgacacattttaaggggattttcgcaatgcgtatcattctgcttggcgctccgggcgcggggaaagggactcaggctcagttcatcatggagaaatatggtattccgcaaatctccactggcgatatgctgcgtgctgcggtcaaatctggctccgagctgggtaaacaagcaaaagacattatggatgctggcaaactggtcaccgacgaactggtgatcgcgctggttaaagagcgcattgctcaggaagactgccgtaatggtttcctgttggacggcttcccgcgtaccattccgcaggcagacgcgatgaaagaagcgggcatcaatgttgattacgttctggaattcgacgtaccggacgaactgatcgttgaccgtatcgtcggtcgccgcgttcatgcgccgtctggtcgtgtttatcacgttaaattcaatccgccgaaagtagaaggcaaagacgacgttaccggtgaagaactgactacccgtaaagatgatcaggaagagaccgtacgtaaacgtctggttgaataccatcagatgacagcaccgctgatcggctactactccaaagaagcagaagcgggtaataccaaatacgcgaaagttgacggcaccaagccggttgctgaagttcgcgctgatctggaaaaaatcctcggctaattcgaaagcgcgcacggacagtcccctcgccccctcggggagagggttagggtgaggggaacaggcccgcacaagcaaacttatcagcaatctcaggccggatattcattcggccttttacaaaaacctcaatctgcgctattcctttttctgatttgacctctcacagcaattagttcttcttcctcacttttccgctacaattatcaacaagttgaatcgataagaggcggtaatgcgtcagactaaaaccggtatcctgctggcaaacctgggtacgcccgatgcccccacacctgaagcggtaaaacgctatctgaaacaatttttaagcgacagacgcgtggttgataccagtcggttgttatggtggccattgctgcgcggcgtgattttgccgctgcgcagcccgcgtgtggcgaagctgtatgcctctgtctggatggaaggtggcagcccgctgatggtttacagccgccagcaacagcaggcgctggcacaacgtttaccggagatgcccgtagcgctgggaatgagctacggcagcccaagtctggaaagcgccgtagatgaactcctggcagagcatgtagatcatattgtggtgctgccgctttatccgcaattctcctgttctacggtcggtgcggtatgggatgaactggcacgcattctggcgcgcaaacgtagcattccggggataagctttatacgtgattacgccgataaccacgattacattaatgcactggcgaacagcgtacgcgcttcttttgccaaacatggcgaaccggatctgctactgctctcttatcatggcattccccagcgttatgcagatgaaggcgatgattacccgcaacgttgccgcacaacgactcgtgaactggcttccgcattggggatggcaccggaaaaagtgatgatgacctttcagagccgctttggtcgggaaccctggctgatgccttataccgacgaaacgctgaaaatgctcggagaaaaaggcgtaggtcatattcaggtgatgtgcccgggctttgctgcggattgtctggagacgctggaagagattgccgagcaaaaccgtgaggtcttcctcggtgccggcgggaaaaaatatgaatatattccggcgcttaatgccacgccggaacatatcgaaatgatggctaatcttgttgccgcgtatcgttaaagctgagcggtaaagaactgagcgccgtcgcgaagagcctcgtcggcggttttcatcatccgactataatgcaaaaaggcgtgcagcgtgcctgggtagagtttgaactcacagggctgctgatgcgccgctaacgtctggtaaagcagacggctgtcatccagcagcggatcgaactccgccccggcaataaaacagggcggaacttcgcgagtgagatcattattaaacagacagtaatacgggctctcgcggtccgcgtcgttgcttaaatatgcctcttcgtacatctgcaaatcctgttgcgttaagccatcccagacaccgcccaacagacgacgagtcacggaatcccgtaatccgtaaagcccataccacagcaaaacgcccgcaactttaccgcaatcgatctgtttatcacgcaaccacaacgcactggcgagcgccagcatggcacctgcggaatcaccggcaaagccaatgcgggacatattgatttgataatcctccgcctgctggtggaaataacaacaagcagccacaatttcctctatcgcttgcggaaaacgcgcttcaggactaagggtgtaatcaataccaatcaccgtacattggctgtagcttgccagcaggcgcatgatgcgatcgtgggtatcgagattgccgagaataaaaccgcctccatgcaaataaaatagcgtcgctgggctatctggctgcggacaaaagagacgtgtttccacctgcccatattttgttggaaccatgtaagctctggttgccatttctggagcgcccgcattccagaatcggcgctcaagcgtgtaatactgtcgttgctcagcaatcgttcccgttgcgggccagggcggtaaatccggctgaagagtattcacaacggtcttcatttcagcagaaataaggtccagaacaggtagtttgttttccggcttcatacaaaaactcctttcaaattacgtcattgtaaggaaccactgccatgaaaatgcgatcccgcctgctgatattgaaactggctgcgtctcgcgcgctcccgtcagattgtgttaacattcgccgctcagttaaccacccgtaaaaacaaccatgaaatttcccggtaaacgtaaatccaaacattacttccccgtaaacgcacgcgatccgctgcttcagcaattccagccagaaaacgaaaccagcgctgcctgggtagtgggtatcgatcaaacgctggtcgatattgaagcgaaagtggatgatgaatttattgagcgttatggattaagcgccgggcatagtctggtgattgaggatgatgtagccgaagcgctttatcaggaactaaaacagaaaaacctgattacccatcagtttgcgggtggcaccattggtaacaccatgcacaactacagcgtgctcgcggacgaccgtagcgtgctgctgggcgtcatgtgcagcaatattgaaattggcagttatgcctatcgttacctgtgtaacacttccagccgtaccgatcttaactatctacaaggcgtggatggcccgattggtcgttgctttacgctgattggcgagtccggggaacgtacctttgctatcagtccaggccacatgaaccagctgcgggctgaaagcattccggaagatgtgattgccggagccagcgcactggttctcaccagttatctggtgcgttgcaagccgggtgaacccatgccggaagcaaccatgaaagccattgagtacgcgaagaaatataacgtaccggtggtgctgacgctgggcaccaagtttgtcattgccgagaatccgcagtggtggcagcaattcctcaaagatcacgtctctatccttgcgatgaacgaagatgaagccgaagcgttgaccggagaaagcgatccgttgttggcatctgacaaggcgctggactgggtagatctggtgctgtgcaccgccgggccaatcggcttgtatatggcgggctttaccgaagacgaagcgaaacgtaaaacccagcatccgctgctgccgggcgctatagcggaattcaaccagtatgagtttagccgcgccatgcgccacaaggattgccagaatccgctgcgtgtatatagccacattgcgccgtacatgggcgggccggaaaaaatcatgaacactaatggagcgggggatggcgcattggcagcgttgctgcatgacattaccgccaacagctaccatcgtagcaacgtaccaaactccagcaaacataaattcacctggttaacttatagtagcttagcgcaggtgtgtaaatatgctaaccgtgtgagctatcaggtactgaaccagcatagtcctcgtttaacgcgcggcttgccggagcgtgaagacagcctggaagagtcttactgggatcgttaagttatcgtcggttcgtaggccagataaggcgttcacgccgcatctggcatttggctctcgatgcctgatgcgacgctggcgcgtcttatcatgcctacatatttttcatattttacatccggcaaccaccgtttaccccgtcaccacctcacccgccggtggcgtttccagcagttccagcatggtacgggcgatttcacgctcgcccatcactacctgattcgcaccacgttcggtgatatacgccacttcatcgtcataatgggcgcgggcaataatctcaatatccggatttttcgcgcgggcagatgccacaatctcacccgcttcataaccgttgggaatcgtcaggatcagccattttgcacattccagatgcgccagttgcataatttcttcgttcgccgcattgcccaatactgcgcggaccccgcgctctcgcagctcatcaacacgggttcgactcgtctcaatcaccaccagcggaatatcagaggcgagcaatttctcccccagcaggctgcctacacgaccgtaacccaccagtagcgcatggttgcaaatatccactgggatctgcttctcttcttcgattgcctcttccagcgtctgctcttccagcgtttcggtcttcgccagatatttctccagtagtgcgaacagtaccgggttgagcataatgctcaggatcgcccctgccagtaccaggttttgtccggcctgcggcagtaaattcaatgccattcccagtcccgccaggataaacgcgaactcaccaatctgcgccaggctggcggcgatggttaatgccgtacgttgggagtgaccaaacagtcgcaccaggaaaaatgcggctaagctcttaccaaacagaataatcgccagcgtcgccagcactgccagcggttgctgaatcagaattaacggatcaaacaacatcccgacggagacaaaaaacagcaccgcaaacgcgtcgcgcaatggcagcgtatcgtgggcggcacggtgactcagttcagactcgttcagtaccatcccggcaaagaacgcaccgagtgcaaaggagacatcaaacagctctaccgcaccaaaggcaacccctaacgccagcgccagcacgctcagggtaaacagctcgcgagaaccggttgccgcgctgcgtgccataatccacggcaccagacggcgacctaccagcatcataatggcgataaatgcgatcactttgccgatggtgatccccatatcgactgcaagagtggcaaagcccacatcgccctgttccatcattcctgccactgcgggcagcaacaccagcgtcagaaccattaccaggtcttccacaatcaaccaaccgatggcgatttgcccacgctgactgtcaattaattgccgttcttcaagtgcgcgcagtaacaccacggtactggcggtggaaagacataaaccgaacacgataccggtcattaagctccagcccagcacggcagagagcgccatacccagcagcgtcgccacggctatctgggcgatcgcaccgggaatggcgatggcctttaccgccatcaaatccttcaggctaaagtgcaaaccgacgccaaacatcaacagaatgacgcccagttcagccagttccggggcaagcttggtatcggcaacaaagcccggagtgaatggtcctgccagcacacccgctaacagatatcccaccagaggagaaatacgtagtttattggccagcatgccgaggataaaggcgagcacaaggccgccaacaatggtggtgataagcggggtggcgtgatgcattccgtctccttttcctggtggttattgtccatttttggccgggaaaaccaaaattacaggtaatagtttatgacaatttcattgatgatgttcatgaataattattgaattttgcagaaaaatggaattagctgcaaaaaaagcacggatcggaaaacagaaggcggtttaacagaggaaaggcttatggcgactgtaaaacgatgcagccaaagtttgcctttggctgcaatgaaatcagtctttatgccggttatcaggcaggaatatggtcaacatccccaatagtggcaggaaagcacagattttatagactaactcgatgctggtgtgatcggcgataagccccagaactgccgctcccagacctcccatgccaaaagcaaaaccgaaaaagagtccagaaaccataccgatacgtcctggaagcagctcctgagcgtagaccagaatggcagagaatgcgctagcgaggataaatccaataatcaccgttaaaacccccgtccagtgcaggctggcgtagggtaaaatcagcgtaaacggcgcaacgccgaggatagagccccaaatcacatatttccgcccaattttatcccctacaggcccgccgatcaccgtacctgccgcaacggcaaacaggaaggcaaacagatgaagctgagcattctggatagataatccgaatttttgcatcagataaaaggtgtaatagctgctgatgctcgccatatagaaatatttgctgaaaatgaggattaacagaatgctgaccgccagtacaactttattgcgcggcagtggattgataatcgtcgctttgggttttcctttattcattcggtgctgtgcgctgtaccaacggctgatttgcgccaacaccacgatcgccagcagtgccgcaagcacaaaccaggcaacgttgcctttgccataaggcgcgataatcaccgccgccagcaagggtcccagggaactgccaaagttgccgccgacctgaaagatagattgcgccaggccatgccgcccgccggaagccatacgggccacgcgagaagattccggatgaaagacgctactaccggtaccgaccagcgccgccgccagcagaactgcgccaaaactgcccgccagcgcaagcagcaccagaccgcttaaggtaaagcacatgccaattggcaagctccatggcatcggatatttatcggtccagtagccgaccactggttgcagtaggctagaggcgagctggaaggtgagggttatcatgccaatctgcataaatgtcagagaaaattcactctgaagcagcggataaatcgccagaatcaggctttggatcatgtcgttcagcagatgactgaggctgatagcacctaaaataccaaagcttgttcgggccttggtcgtactcgcagccgcgcccgccacaggctggggttgttcactcattgccataggaaagtcactttttcagggttgcgatgtaaagaatgatcttatttgtgattattaccagactaacatacctgtatgcgtcgtctgaaggaagtctcaacgccgaatacagaatttctaatctggatgcagatttatcttcaccggacgcagacttgtctatgatgtcgcgtcatactatttttcaacacgttgaaatcaggtcagggagagaagtatgaaattattgcagcggggcgtggcgttagcgctgttaaccacatttacactggcgagtgaaactgctctggcgtatgagcaggataaaacctacaaaattacagttctgcataccaatgatcatcatgggcatttttggcgcaatgaatatggcgaatatggtctggcggcgcaaaaaacgctggtggatggtatccgcaaagaggttgcggctgaaggcggtagcgtgctgctactttccggtggcgacattaacactggcgtgcccgagtctgacttacaggatgccgaacctgattttcgcggtatgaatctggtgggctatgacgcgatggcgatcggtaatcatgaatttgataatccgctcaccgtattacgccagcaggaaaagtgggccaagttcccgttgctttccgcgaatatctaccagaaaagtactggcgagcgcctgtttaaaccgtgggcgctgtttaagcgtcaggatctgaaaattgccgttattgggctgacaaccgatgacacagcaaaaattggtaacccggaatacttcactgatatcgaatttcgtaagcccgccgatgaagcgaagctggtgattcaggagctgcaacagacagaaaagccagacattattatcgcggcgacccatatggggcattacgataatggtgagcacggctctaacgcaccgggcgatgtggagatggcacgcgcgctgcctgccggaagcctggcgatgatcgtcggtggtcacagccaagatccggtctgcatggcggcagaaaacaaaaaacaggtcgattacgtgccgggtacgccatgcaaaccagatcaacaaaacggcatctggattgtgcaggcgcatgagtggggcaaatacgtgggacgggctgattttgagtttcgtaatggcgaaatgaaaatggttaactaccagctgattccggtgaacctgaagaagaaagtgacctgggaagacgggaaaagcgagcgcgtgctttacactcctgaaatcgctgaaaaccagcaaatgatcagcctgttaagtccgttccagaacaaaggcaaagcgcagctggaagtgaaaataggcgaaaccaatggtcgtctggaaggcgatcgtgacaaagtgcgttttgtacagaccaatatggggcggttgattctggcagcccaaatggatcgcactggtgccgactttgcggtgatgagcggaggcggaattcgtgattctatcgaagcaggcgatatcagctataaaaacgtgctgaaagtgcagccattcggcaatgtggtggtgtatgccgacatgaccggtaaagaggtgattgattacctgaccgccgtcgcgcagatgaagccagatagtggtgcctacccgcaatttgccaacgttagctttgtggcgaaagacggcaaactgaacgaccttaaaatcaaaggcgaaccggtcgatccggcgaaaacttaccgtatggcgacattaaacttcaatgccaccggcggtgatggatatccgcgccttgataacaaaccgggctatgtgaataccggctttattgatgccgaagtgctgaaagcgtatatccagaaaagcagcccgctggatgtgagtgtttatgaaccgaaaggtgaggtgagctggcagtaatccgaaagtgccggatgtttgcatccggcacaatgcttaatcgcggcgggcgatatcagcaaatttggcatcgaggatctttgccagatcgcctgccgccagttcgatatccagtccgcgcttgccgccggaaacataaatagtggcaaattcttgtgcgggggcgtcgataatcgttggcagacgttttttctgccccagtgggctaatccccccaaccaggtatcccgtgctacgctgcgcgaccatcggatcggccatctcaactttcttggcacccagcgcttttgctacttttttaagatccagttgacctgcgaccggcgtaacggccacggcaaggtgtttcatatcaccgttcactgccaccagcagcgttttgtagacctgatccggattcaaacctaattttttgacgacttcatcgccaaaattggtttcagccggatcgtgctcgtaggtatggatttgaaagctaatcttgtttttttcgagtaatttaactgcgggtgtcatggtaattttcctgccttaaacaaaaaaacgaagcaagcatacgcctgatggcggtccaaaaaaaagagtcatcttgcctaagagtattggcaggatggtgagattgagcgacaatcgagttacaccgtcgcttaaagtgacggcataataataaaaaaatgaaattcctctttgacgggccaatagcgatattggccatttttttagcgcaacatttgcggcaaattcccttctccatacaggtgtagtgcaccgaccgcgaccacatatcgccccggcggcatggcgcgtaatttatcccgccaggcgagatttcgctgatgcatcagcacatcgtacaggctctgactgaacgtattgggcagcgttatatcattattttgcggcggtgcattcagccaccagctcatcatttgttgcagcaaccgtgcgttggtatgccagtgggtcagcgtatcgtccagcagcgccagtcctttgtcagggagctggagcaacatggcaatctggttttcagccccttccagttcaatcacgggtttatgttgttgcttcgccgcctgcaatagctggtaatcgataccgtattctgcccgcagccccagtttttgtgcctgcgtcgcctgaagaaccatcgcgatttgccacagcggttgggtagaaaagagactgggagaaatgcccatctcctggctaatgtgctgcaggttttggagttgctcctcgctaatgcgctcttccagcgcctcgcaggcaggcaaattagcaaaaggcgtatcgctggtggaaacatccgcctcgacgatcagcgcatcggcgtttttgagctttttgagcaaacgggtgggcaggggagccatatcgtggctacccatatgaatactgccaatcagatgaaaatggcgattgccggggagggtgatatcgatggcaggccaggtgtaatgattaccgcgcagcgcggcccaaagcgtttttacccggtacaacagatccatacgacctccctttgtgaaatatcatgctagcgcgcggtgagggatggcgcaaatggagttggagacttgtttaatgtgtttgtatgattcagtatgttcttgcatcgctattcacaaggaagcaacagttaaaaaccatgaaacaggcaacaagaaaaccgacgacacccggagatattcttctctatgaatatctggaaccgctcgatttgaaaatcaatgagttagcagagttgctgcatgttcatcgtaatagcgtcagtgcactgatcaataacaatcgtaaactcactactgagatggcatttcgtctggcgaaagtttttgataccacagtcgatttttggctaaacctccaggcggcggttgatctttgggaagttgaaaacaacatgcgcacccaggaagaattgggacggattgaaacagtggctgaatatttggcacgccgtgaagagcgtgcaaaaaaggtcgcgtaaggccaaaacatcgcttcatctcgtaggccggataaggcgttcacgccgcatccggcatccgagcaccattgcctgatgcgacgcttacccgtcttatcaggcctacaaacttgtgcctgaaccgtaggccggataaggcgtttacgccgcatccggcatccgagcaccattgcctgatgcgacgcttacgcgtcttatcaggcctacaaacctgtgcctgaaccgtaggccggataaggcgtttacgccgcatccggcagtcatgcgtcgatgccaaatgcgccaccctaaagcagcgcatccgcaatgatgtacttattccttcggtttaaaccgcagcaaccggttggcgttactcactacggtaatgctgctgagcgccattgccgctccggcaactaccgggttaagcagtgttccagtgaacggccacaaaataccggcggcgaccggaataccgatactgttgtagataaacgcaccgagcaggttctgcttcatgttgtgcagcgttgcgcgggaaatagcgagcgcatccgcaacgcccatcaggctatggcgcatcagggtaatcgccgcggtttcaatggcaacatcactgccgccacccatcgcaatgccgacatccgcctgagccagcgctggcgcgtcgttaatgccgtcgcccaccattgccacctaacgtccttcactttgcagatgtttgatcgcttcggctttaccgtccggcagcaccccggcgatcacctcatcaatccctgcttctttggcgatcgcattggcggtggttgggttatccccggtcaacatcaccagacgatatcccgctttatgcaggcgttgcagcgccgccacgctatcactacgcaacggatcgcgtactgccagcagggctaccgctttcccgtcaaccgccagcagcacaggcgttgccccttggcttgcctgagcagtaatctccgcttcgatagctttggtaccaacctgttgctcatttaacagcgcctgattgcccagcaataacgcatgaccttcagcttcaccgctcacgcccagcccgcgcaatgtgcggaaaccgttgacctgcggtagctgcatatcacctgctttatcgaggatcgctcgtgccagcggatggctggaaccttgctccagtgccgccgccagacgcaatgcctgcgcttcatcaacatcagcaaatgttttcactgcgacaacctgcggcttcccttcagtcagcgtcccggttttatcgaacactacagtgtcgagtgtactggcgcgttgcagcgcgtcagcgtcccgcaccagcacgccaaactcagccgcccgcccgacgccggaaataatgctcatcggcgtcgccagccccagcgcacacggacaggcaataatcagtaccgtggtggcaatcaccagggtatagacaatctgcggtgccggaccaaagaaataccagattgccgcactgacaagcgcaataaccaccactaccggcacaaatacggcactgattttatccgccagctgaccgatttctggcttgctgctctgggcctggcgcaccatgcgaatgattcgactcagcgtagtatggctgccaaccgcactggcacgaaacagcacactgccgtcctgtaccactgtcccggcatggacgctatcgccttcgcctttttgctgcgggattggttcgcccgtcagcatcgcttcatccagccatgcttcgccctgggtaatctcgccatctaccggcacgcgatcgccggtcgtcaggcgcagcaacatacctggctgcacttctgccagaggcacgcttttttcaccttcgtcagtaaccaggcgtgccgtcggcggggttaaatcgagtaacttttccagcgccttagaagaacgctggcgtgcgcgcgcttccagcatatggccgagattgatcagaccgataatcatcgcgctggcttcgtaataaagatgtcgcgcttccatcgggaaccactgcggccacaggttgacgctcatgctatagagccacgccacgccagtacccagcgccaccagcgtatccatcgtcgccgcaccgttcagcaggcttttccatgcactgcggtaaaaatggccgccggcgaaaaccatcactgccagggttatcaggccgataaccaaccacaggctgcggttgtcagcggtgaccatcatgttatcgccgatcatcccccagaccatcaccgggatacccaccgccagtgcgacaattgcctgccagcggaagcgcttcatcgtagcgacggcggtttcttgctggcgctcgcggcgtttagcgtcatcttcaatcgcttccgcgccgtagcccgctttttccaccgcctgcactaaatcttgtggggaggcactgcccatcaccagcgcagtacgctccgccaggtttacccgtgcctgagtgacgcccggtacgctttgcagcgcattttgtacgcgggtgacacagctggcgcagctcatgccgctcagcagcaactgctggctgtcatcgtcatcggcggtcgctgccggaagcgcctcagaaaccgctgtcagtgcttcgctcgggatactactctccgccagcggtttagcctttgggtggcttacagatgcgtcataacccgcttgtttgatggtttcgatcagctgttctgcactggcagtcccggtaacgtgcgcttcagtgatagacacatccgcctgctcaacatccggacgctgttcaagactttctttcacgcgtttaacgcagtgaccgcaggacaggccgtccagggtcaggtcgatagtttgactcataaaacactcctttaagacagttttgactggctgtgataaaggttaaaccttccagcaaggggaaggtcaagaaattaataaaccaggcgggtaaaagtccgtaaagattaaaaaatcggctcgatttgcatcaggattagacatttatctctttgttttcctgtagttaagttgcgggtgctaagttaaatcaggatgcctgaaaatcggcaccggggtgaggaattacctcccgcatctataaaaaggagttaacaaaagatgttagatgcaaacaaattacagcaggcagtggatcaggcttacacccaatttcacagtcttaacggcggacaaaatgccgattacattccctttctggcgaatgtaccaggtcaactggcggcagtggctatcgtgacctgcgatggcaacgtctatagtgcgggtgacagtgattaccgctttgcactggaatccatcagcaaagtctgtacgttagcccttgcgttagaagatgtcggcccgcaggcggtacaggacaaaattggcgctgacccgaccggattgccctttaacagtgttatcgccttagagttgcatggcggcaaaccgcttagcccactggtaaatgctggcgctattgccaccaccagcctgattaacgctgaaaatgttgaacaacgctggcagcgaattttacatatccaacagcaactggctggcgagcaggtagcgctctctgacgaagtcaaccagagcgaacaaacaaccaacttccataaccgggccatagcctggctgctgtactccgccggatatctctattgtgatgcaatggaagcctgtgacgtgtatacccgtcagtgctccacgctcctcaatactattgaactggcaacgcttggcgcgacgctggcggcaggtggtgtgaatccgttgacgcataaacgcgttcttcaggccgacaacgtgccgtacattctggccgaaatgatgatggaagggctgtatggtcgctccggtgactgggcgtatcgtgttggtttaccgggcaaaagcggtgtaggtggcggtattctggcggtcgtccctggagtgatgggaattgccgcgttcagtccaccgctggacgaagatggcaacagtgttcgcggtcaaaaaatggtggcaagcgtcgctaagcaactcggctataacgtgtttaagggctgatcatgatgaacacggaaggtaataacggtaacaaacctctcggtctatggaacgtcgtttccatcggcattggggcaatggtgggggcggggatcttcgcgctgctggggcaggctgcattgctaatggaagccagcacctgggtcgcctttgcttttggcggtattgtggcgatgttttccggttatgcctatgcgcgtctgggggcgagctatcccagcaatggcggcattatcgacttctttcgtcgcggattaggcaacggcgtctttagcctggcgctcagcttactgtacctgttgacgctggcggtgagcatcgccatggtcgcccgtgcttttggcgcttatgccgtgcagtttttgcatgaaggcagccaggaggagcaccttattttgctctacgcgttggggatcattgcggtgatgacgcttttcaactccttaagcaaccatgcggtagggcggctggaagtgatcctcgtcggcattaaaatgatgatcctgttattgctgattattgccggtgtctggagcctgcaaccggcgcatatttccgtctctgcgccccccagctccggtgcgttcttctcctgtattgggataactttccttgcctatgcgggctttggcatgatggcgaacgcggcggataaagtgaaagatccgcaggtcattatgccacgggcgtttctggtggcgattggcgttaccacgttgctttatatcagcctggcactggttttgcttagcgatgtaagcgcattagagttagaaaaatatgccgataccgccgtagcgcaggctgcttctccgctgctcgggcatgtgggttatgtgatcgtcgtcatcggcgctttactggcgacggctagtgccattaacgcgaacctgttcgccgtgtttaacatcatggacaacatgggcagcgaacgcgaactgccgaagctaatgaataaatccctgtggcggcagagtacctggggcaacattattgtcgtggtgttgattatgctgatgacggcggcactgaatttaggcagtctcgccagcgttgccagcgccacctttttgatttgctacctggcggtgtttgtggtggcgatccgcctgcgtcatgatattcacgccagcttgccgattcttatcgttggtacgttggtgatgttgttggtgatcgttggctttatctacagtctgtggtcccagggtagccgtgcgttgatatggattattggcagtctcttactcagccttattgtggcaatggtcatgaagcgcaataaaaccgtataacatctctctgtgcgcagtacttcctgtattattgtggtggcggtcgatattcgcactggcaaaaaaacgtgcttgaatatctgttgaaaccctttaacaaagcacaggaggcgttgcgcgaacgatgaacatcagcgatgtagcaaaaattaccggcctgaccagcaaagccattcgcttctatgaagagaaggggctggtgacgccgccgatgcgcagcgaaaacggttatcgcacctacacgcagcagcatctcaacgaactgaccttactgcgccaggcacggcaggtgggctttaacctggaagagagcggcgagctggtgaatctgtttaacgacccgcagcggcacagcgccgacgtcaaacggcgcacgctggagaaggtggcggagatcgaacgacacattgaggagctgcaatccatgcgcgaccagctgctggcactggcgaatgcctgccctggcgatgacagcgccgactgcccgattatcgaaaatctctccggctgctgtcatcatcgggcagggtgattaagagctgacggctcggatatgtagggttatcccttctatcgcaatgacttcaacatgcgtacctgcaccgagatcctcgctggcgctgacaggccaactactgtcaccgacgcgcatatgaccgcgcccgttgaccagcggagattccagcacaaaacgtcggccaatcagctgctgcccgcgctggtttaaatgactatcgctgtgcttttgttcgcgcacccgccggctcaaccatttccaccacagccaggcggcgagcagcgtcaggatggcaaacattaccccttgccactcccaacccagcggcaccagccagaccaccaggccggtaatcaccgctgccacgccgctccacaacaaataaccatttccgcccagcatctcggctgccagcagcaaaccgccgagactgagccagaaaatatgtggatgaacgaccattaactccatcatggctgagtccgtttgttggcgctgtctttcaccagctcggcaatcccggcaatgctccccatcaggctgctggcctctaatggcatcatcactactttgctgttactggaggaaccgatctgctgtaacgcttcggtgtatttctgcgctacgaagtagttcaccgcctgaatatcaccggaggcgatagcttcagacaccattttggtggcgcgggcttctgcttcggcggaacgttcacgcgcttcagcctgtaaaaacgcgctctgacgttcgccttccgctttcaggatttggctctgtttttcaccttcggctttgaggatttccgcctgacggatcccttccgcttcaagaatgtaagcgcgtttggtacgttccgctttcatctgcgcgttcatactagagataagctctgccggtgggcgcacgtcgcgaatttcaatacgggtgactttaatcccccacgggttggtggcttcatcgacaatacgcagcaggcgactgttgatgctgtcgcgctgagagagcatttcgtcaagttccatactacccagcacggtacggatgttagtcatggtcaggttgatgatcgccagctccagattgctgacttcataagccgcgcgcggcgcgtcaatcacctgaataaagcacacggcgtcgatggtaacgttggcgttatctttgctgataacttcctgggaagggatatcgagcacttgctccatcatattgatcttgcgaccaatgcgatccataaacggcaccaccagactgagccccggctgtaacgttttggtatagcgaccaaagcgttctactgtccactgatagccctgcggtacgattttgacacccgcgccgacaatgaccagcgcgacaaaaatgagaatcgggataaagataagcatcggaaaaacctcctgttgtaccgtccataatcagcaaaattgctgcttgattaaacaaattatacctgattactgaaagagagttcccccttattcctgcgaaggataaactgtttttagtaaaaatcagaaaaagggaacagcgatgcaggaaaatagtcctttgcttcagctacaaaacgtaggatatctggcgggtgatgcgaagattcttaataacatcaattttagcctgcgtgctggcgaatttaagttaattaccggtccttctggttgtggcaaaagtacgctgctaaaaatagttgctagtttgatcagcccaaccagcggaacgttactgtttgaaggtgaggatgtcagcacactaaagccagaaatctaccgccaacaagtctcttactgcgcccagacaccgacgctgtttggcgatacggtatacgataatctgatctttccctggcagatccgtaaccggcagcctgacccagccatttttctcgattttctcgaacgcttcgccttgccggacagcattttgacgaagaatatcgccgagctatctggtggtgaaaaacaacgcatcagtttgattcgtaacctgcaatttatgccgaaggttttattgctggatgaaataaccagtgcgctggatgaaagtaataaacataacgtcaatgagatgatccatcgttatgtgcgcgagcaaaatattgccgtgctgtgggtgacacacgataaagacgaaattaatcatgcggataaagtgattacactgcaaccgcatgccggagaaatgcaggaagcacgctatgaactcgcataactaaagaaatgcaggaagcacgctatgaacagccataatattactaacgaaagtttagcactggcattaatgctggtggtggtggcaatcttaattagccataaagaaaaactggcgctggagaaaaatattctctggagcgtcgggcgagcgataattcagctgattattgtcggctatgtgctgaagtatattttcagcgtggatgatgccagcctgacattattgatggtgttatttatctgctttaatgcggcgtggaacgcgcaaaaacgcagtaaatatattgctaaagcttttatcagtagctttattgccattacggtcggggcgggaattaccctggcggtgctgattctcagtgggagcattgaatttatcccgatgcaggtgatccctatcgccgggatgattgccggtaacgccatggtagcggtggggttgtgttacaacaatttagggcaacgggtcattagcgaacagcaacagattcaggagaaactgagtcttggtgcgacgccgaagcaggctagtgcgatattgattcgcgacagtattcgcgcggctttaattccgacggtcgatagtgcaaaaacggttggcttagtgagtttaccaggaatgatgtccgggctgatatttgccgggattgatccggtgaaggcgattaaatatcagattatggtgacctttatgctgctcagtaccgccagcttgagcaccattattgcctgctatttaacctatcgtaagttttataatagccgccaccagttggtggtgacgcaattgaagaagaaatgatgcgatgccggatgcgcagcatcgcatccggcgttgtggttcatgtgccgatcaacggaatatcaatacaacaatgcatacagctggcggcgatacttgctcgccagtgcatcacccgtacccagcgcagcgaggatctcctggaacgttttacgcgtctgaccgtctgcggcggtgagatctttacgcagatgcccgaacagcaactccagcgcctcttcattgcgcccaacctgatgcagttgcagcgccagttgcgtcgccagtgcggcatcttctggattctccgccacctgctgttgcaactgttgaatttccggcgtatcagccgcctgcttcagcagttcgatttgcgccaccagcccctggtagcgggtgtcctgatcctgcaacggaatggttttcagcaccgcttccgcatcttcagaacggttcagcgcaatcagcgtttctgccagcagcaggccgatctccccgttctgattgctcaactgccaggcgtctttcagcaatggcagggcatcggtgtaattgctttcctgcatcagttgcatcgcctgctgcgctttcagctcttcttcgcgcggcagcactttatccagcagggcgcggatcgcctcttccggttgcggcccctggaagccatctaccggttgcccgttctggaacagatacacggtcggaatcgcacgcagaccaaactgcgcggcaatcatctgctccgcgtcgcagtccagcttcgccagaataaattgcccgttgtactgcgccgcgaggctttccagaattggggttaactgcaaacagtgctggctacgttcagaccaaaaatagaacagcaccggagtggtcatgctctgttcaagaacctgttgcaggttagattcgttaatgttgacaatattttctacggacatggagtcgctctctgttgtcgatattttctttgacatgggggcttaagcgcgcgcttcaactcacccctgcaatattttgtccatcacgcgccccggcagcaggcgcttaagcaccattaccgcccaggtcaccagcgtcaccggatagcgcatcttcggcttctcgctaataaaagcatggcgtactttgtccaccaccgcttccggtcccaacgtaaagcgggcggcgatgccgggattttcgactggtttatcactttgcgtctggttgacgttgtcggtgaagcgagtacgaatgggaccgggttcgatcaggctgactttaattccgctgtggcgcagctccatgcgcagtgcatcactccacgcctccagcgcatatttactggccgcgtaagcgccacgacccggcgtggagattaatcccatcacgctacttgtcatcacaatacgcccttcaccgtgcggtaacatcgcgggtaacaggcgcatggtgagctggtgtgcgccgaaaaagttggcggaaaactgctgttccatctgcgcacggctgatggtggaaagggggccatacatgccgaatccggcattgttaaagatcccatacagacaattatcggtcagggcgatcacctcgtcggctgcgcgatcaacactttctggactatccagatcgatcaacacgccggtaaatcccatgctgttcatgcgctcaacatcatccggtttccggcaacctgccagcacatgaaaaccctggcgttttaattcgagcgcgctttccaggccaattccactggaacatccggtaattaagacgcttttttgcataactttacctgtcaggatctccgttgctttatgagtcatgatttactaaaggctgcaacttatttaactgtcatgatttactaaaggctgcaactgcttcgccatccagtcggcaataaacggctgggcgtcgcggttgggatgaataccgtcatcctgcatccattgtggcttgaggtagacctcttccataaaaaagggcagcagcggaacatcaaactctttggcgagtttggggtaaatggcgctaaaggcttcattataacggcgaccatagtttgcaggcagacgtatttgcattaacaatggttcagcgttggcggctttgacatcctgcaaaatctggcgcagcgtttgctcggtttgctgtggctgaaaaccacgcaaaccgtcattgccgcccagttcaaccagcacccaacgcggctgatgctgtttcagcagagccggaaggcgcgccagtccttgttggctggtgtcgccgctgatgctggcattaactacgctcgttttactctgccacttatcattcaacaaggcaggccaggccgcgctggcagacattcgatacccggcgctcaggctatcacccagaatcaataacgtgtccgctgcggcggcacggaaggttaacaggaccaggaacaggaagggcaaatgccagcggaaaacattgttgaagttcatcatcttaagaagtccgtcggtcagggggagcatgaactctccatcctcaccggagttgagctggttgtcaaacgtggcgagaccatcgcactggtgggcgagagcggaagcggtaagagtaccttgctggcgatcctcgccgggcttgatgacggcagcagtggcgaagtgagtctggtgggacaaccgctacataatatggacgaagaagcgcgggcaaagttgcgcgcgaagcacgtcggctttgtttttcagagttttatgttaattcctacccttaacgcgctggaaaacgtcgagcttccggctctgctgcgcggtgagagtagcgcggaaagtcgtaacggggcgaaagcgttgctcgaacagttagggctgggtaaacgtctggatcatcttccggcacagctttccggcggtgaacagcaacgagtggcgctggcacgagcctttaatggtcgacctgatgtgctgtttgccgacgaacccaccggcaaccttgaccgccagacgggcgataaaattgccgacctgctgttttccctcaaccgtgaacatggcaccacgttgattatggtgacccacgacctgcaactggcggcacgctgcgaccgctgcttacggctggtgaacgggcagttgcaggaggaagcatgattgcacgttggttctggcgcgaatggcgtagcccgagcctattaattgtctggctggcgctaagcctggcggtggcctgcgtgctggcgctgggcaatatcagcgatcgcatggagaagggcttaagccagcaaagccgtgagtttatggcgggcgatcgggcgttgcgcagtagtcgcgaagtgccgcaagcgtggctggaggaagcgcaaaagcgcggcctgaaagtcggcaagcagctgactttcgccacaatgacctttgcaggcgacacaccgcagctggcgaacgtcaaagcggtggatgatatctacccgatgtatggcgatctgcaaactaatccccctggcctgaaaccgcaggcgggcagcgtattgctggccccacgcctgatggcactgcttaacctgaaaacgggcgacaccattgacgtgggcgatgccaccttgcggattgccggagaagtgattcaggaaccggattccggttttaaccccttccagatggctccgcgtctgatgatgaatctggcggatgtcgataaaaccggagccgtgcagccggggagtcgggtcacctggcgttataaattcggcggcaacgagaaccagctcgacggctatgagaaatggttgttacctcagcttaaacccgaacaacgctggtacggtctggaacaggacgaaggcgcgctggggcgaagcatggaacgcagccaacagttcctgctgcttagcgcgcttctgaccttgctgctggcagtggcagcggtggcggtagcgatgaatcattactgtcgcagtcgctacgatctggtggcgatcctcaaaacgctgggggcagggcgagcgcaactgcgtaagctaatcgtcggtcagtggttgatggtgctgacgcttagtgccgttaccggtggggccataggcctgttgttcgaaaacgtgttgatggtgctgctcaagcccgttctgcctgctgcactaccgccagccagcctctggccgtggctgtgggcgcttggcaccatgacggtcatcagcctgctggtggggctacgaccatatcgcttgttgctggcaacgcagcctttacgcgtattacgtaatgatgtggtagcgaacgtctggccgctgaagttttatctgccgattgtcagtgtggtggttgtgctgctgctcgccggattaatgggtggcagcatgctgctttgggcggtgctggcgggcgcggtagtactggctttgctgtgcggtgtgctgggctggatgctgctgaatgtacttcgccgcatgacgctgaaaagcctgcctctgcgcctggcggttagccgcctgttacgtcagccgtggagtacgttaagtcagcttagcgcatttagcctctcctttatgctgctggcactgctgctggtgttgcgtggcgatctgctcgaccgctggcagcagcagctacctccagaaagcccgaactactttttaattaacatcgccacagaacaggtagcaccgctaaaagcgttcctcgcggaacatcagatagtcccggaaagcttttatccggtggtgcgggcgcggctgacggcgattaacgataagccgacagaaggtaatgaagatgaggcgcttaaccgcgaactcaatcttacctggcaaaatacgcggcccgatcataatccgattgtcgccggtaactggccgccaaaagccgatgaagtgagcatggaagaggggctggcgaaacgcttaaacgttgccctcggtgataccgtgacttttatgggcgatacccaggagttccgcgctaaagtgaccagcctgcgcaaagtggactgggaaagtctgcggcctaatttctattttattttccctgaaggggcattagacgggcaaccgcagagctggcttaccagtttccgctgggagaatggcaacggcatgttgacacaactcaaccgccagttcccgaccattagcctgttagatattggcgcgattttaaaacaggtcggtcaggtgctggagcaggtaagtcgggcgctggaagtgatggtggtactggtcaccgcctgcggtatgttgctgttgctggcacaggtgcaggtgggaatgcgtcagcgtcatcaggagctggtggtgtggcgcacactcggtgcggggaaaaaactgctgcgtaccacgttgtggtgtgagttcgccatgcttgggtttgtttccggcctggtggccgcaattggtgcggaaacggcgctggcagtgttgcaggcgaaagtgtttgattttccgtgggagccagactggcgattgtggattgttctgccgtgcagcggagcgctgctgctgagccttttcggcggctggctgggtgcgcgactggttaagggtaaggcgctgttcaggcagtttgcggggtgatgagagtccctcattaccgcgccttaacccattccgccacttccgcccactcaccgcgaaagacaactttttccgcttttttctcaagctgatagcgatacatcgggtcgtaatattcttcaagtaacggcaccagccaggccagatgaccgtcggtgctgccggtggtgagttgcgttgtcagtgctgcatccagccttgcagccagttcgttatagcgctgtagccccagccgacgcttaatcgcgctaagtccgtgatgcaggtattcgcaatactcctgccagccctgttcgtcgccgtacgcgtgggtaaaatcatgatgcatacgcaagaaatactcttcgttcaggcgctcaagacggatctcaaacggatcttctaccaccgcaatcgccgcctgagtcattcgctcgcgcaggcattccggcaggtgattgctaccgatcatccggctttcgtcttccagcacccacaggcgcaaattctgacgggcgtcggtttttagcatttcggcagccagcaggttttcaaaactcgcctggctaagttgtggttgtaacgtgcgaccaaacgcgctaccgcgatgacgcgccaacccttccagatcaacaccgttcggctgttgctgcactaacagcgttttaccgctgccggtacaaccgccaatcagcactatcggtttttgtgccagttcaatagtcgcctgaatcgcggtctggcgcagtgccttataaccgccttccaccagcggataatcaatccccgctgcatgcaaccagctttgcacaatatgactgcgctgaccgccacgggcgcagcagagaataccttgcggattttgcaggcacgctgcccgccaggcgtccatgcgctgctgacgaatttcacccgccaccagtttatgtcccagcgccagcgctgcgtcactgccttgctgtttatagcaggtgccaacggcggcgcgttcatcgttattcattaacggcagattgatagcggcgggcattgcgccgtgctcaaactcgataggggcgcgaacatcaataatgggcgtatcagcaatcagcagggcacgatagtcctgttccgtgtgtctctcttgcatagttaaaagtgaacctcaaatcagcttgcgcgctattttacgcgccaacgcgcaaggaaacttgatttttaactgcgtgggttgccgaaaatttctaaaaatccgctgatttccggcctgcgctgggtaaacaaggtcacaatatcttctaccgctttgccgctgccaaatttgcgccatgccagactcaatgggctaggagggcgcatcgttgggattacccggctgaccagttgttgattatcgatcatactctggcaaaggctttttggcaaaaaaccaatgccaacgcccgccagatgggcggcgattttcgtttccatatcgggaacaataatctctttttgccctggcaatcgccaggcgacgcgtttggttaaggtgcgggcgctgtcttcaatattgaccgccggaaagcgccgcaactgcgcttctgttagcggctcttcaacgttcgccagcggatgatccgccgccatgacaaagcgccattgcacgcttcctaagggatcaagactaaaggtatttgccagcgcctcagttcccgtgacgccgatagccaggctaaaaccttcgtacaataggctgtcccagacgcccatatagatttgtcgggagatgtgaaactgggtaaaggggtaacgctcattcagccacgccagcaactgggcgacggcctgggggttgtagagcaggttgttgatgacaatattcacctggcgttccacgccatcattcacctgttgcagctcgcttggcatactttccagccagctcagccagtctctggcctgggaaagtagatgctcgccagccgctgtcaacgtcacgctgcgagtcgtacggaaaaacagcgctactccggtattctcttccagaagtttaatgcgataactgatcgtcgccgtggttttacataatcgttctgccgctttactaaaacttcctgtttcagcaaccgcaatgaaagtccgcaaggtttctggatcgaacatcttcaggtatccccttttaaatccgcaagttgcgtgattttcttatcctctgatttatcagtatttttacatgataaccctgttcaatttgtggactaaatctagttttggaaaaatattccaacttttgtattgatgttgttctcttaaggttttagattgcctgttattgaaaccaagctgaccggtcggcggtggttgaacggaattatgttacaaggacaaaaagatgaaacttcaggtattaccgttaagtcaggaagcctttagtgcttatggcgacgtaatcgaaacgcagcaacgggattttttccatattaacaatggcctggtggagcgttaccacgatttggcgctggttgagattcttgagcaagactgtacgcttatcagcattaaccgcgcgcaaccggcgaatctgccgctgaccattcacgaactcgaacgtcatccgctgggtactcaggcctttatcccgatgaaaggtgaggtgtttgtggtggtcgtggcgttaggtgacgacaaaccagacctgagtacgctgcgggcgtttatcaccaacggcgaacagggagtgaattaccatcgtaacgtctggcatcacccacttttcgcctggcagcgcgtcaccgattttctgaccatcgatcgcggcggcagtgacaactgtgatgttgaaagtattcctgaacaggaactctgttttgcgtgacgcctgcaaccgacttgcataagataaactaattgttcattgtttatgctcacttgtaggtcggagttaacgtaggtatgacggaagttagacggcgcggcaggccaggacaggcggagcctgtggcacagaagggcgcacaggcgttagagcggggaattgcgattctgcaatatttggaaaaaagtgggggaagtagcagcgttagcgatatttctctcaatctggatttgccgctctccacgacctttcgcttgctgaaggttttacaggcagcggattttgtctatcaggacagtcaattaggctggtggcatataggattaggtgtctttaacgtcggtgcggcgtacatccataaccgcgatgtcctctccgtcgccgggccgtttatgcgccgcctgatgttactttccggcgaaacggtcaatgtcgcgatccgtaacggcaatgaagcggtattaattggtcagttagagtgtaaaagcatggtcaggatgtgtgcgccactgggcagtcgtctgccactgcatgcttccggtgcgggcaaagcgctgctttatccgctggcggaagaggagttgatgagcatcattctgcaaaccggtttgcagcagtttacgccaactacgcttgtggatatgcccaccttgctgaaggacctggaacaagcgcgtgaactgggctataccgtagataaagaagagcatgttgtaggtctgaattgcatagctagtgcaatttacgatgatgtcggtagtgttgttgccgctatctccatctccgggcctagtagtagactgacagaagatcgttttgtcagtcagggtgagctggtcagagacaccgcccgcgatatcagcacggcgttgggactgaaagcacatccataatgtctgtcgcatcccgctctgcggagcgggtttttttgacaaaatttgaaagttggaaaaattttccaataaatagaggtaggaataaaatggcaaaaatgagagccgttgacgcggcaatgtatgtgctggagaaagaaggtatcactaccgccttcggtgttccgggagctgcaatcaatccgttctacagtgcgatgcgtaagcacggcggtattcgtcacattctggcgcgtcatgtggaaggtgctagccacatggcggaaggttatacccgcgcaacggcagggaatatcggcgtatgtctggggacttccggtcctgcgggcacggacatgatcaccgcgctctattccgcttctgctgattccattcctattctgtgcattaccggccaggcaccgcgcgcccgtctgcataaagaagattttcaggccgtagatattgaagcaattgctaaaccggtcagcaaaatggcggttacagttcgtgaagcggcgctggtgcctcgcgtgctgcaacaggcatttcacctgatgcgttctggtcgtccgggtccggtactggtggatttaccgttcgacgttcaggttgcggaaatcgagtttgatcctgacatgtacgaaccgctgccggtctacaaacctgctgccagccgtatgcagatcgaaaaagctgtagaaatgttaatccaggccgaacgtccggtgattgttgccgggggcggggtaattaatgctgacgcagctgcactgttacaacagtttgctgaactgaccagcgttccggtgatcccaacgctaatgggctggggctgtatcccggacgatcatgaactgatggccgggatggtgggtctgcaaaccgcgcatcgttacggtaacgcaacgctgctggcgtctgacatggtgtttggtatcggtaaccgttttgctaaccgtcataccggcagcgtagagaaatacaccgaagggcgcaaaatcgttcatattgatattgagccgacgcaaattggtcgcgtgctgtgtccggatctcggtattgtctctgatgctaaagcggcgctgacactgctggttgaagtggcgcaggagatgcaaaaagcgggtcgtctgccgtgtcgtaaagaatgggtcgccgactgccagcagcgtaaacgcactttgctgcgcaaaacccacttcgacaacgtgccggtgaaaccgcagcgcgtgtatgaagagatgaacaaagcctttggtcgcgatgtttgttatgtcaccaccattggtctgagtcaaatcgctgcggcacaaatgctgcatgtctttaaagaccgccactggatcaactgtggtcaggctggtccgttaggctggacgattccggctgcgctaggggtttgtgccgctgatccgaaacgcaatgtggtggcgatttctggcgactttgacttccagttcctgattgaagagttagctgttggcgcgcagttcaacattccgtacatccatgtgctggtcaacaacgcttatctggggctgattcgtcagagtcaacgcgcttttgacatggactactgcgtgcaactcgctttcgagaatatcaactccagtgaagtgaatggctacggtgttgaccacgtaaaagtagcggaaggtttaggttgtaaagctattcgggtcttcaaaccggaagatattgcgccagcctttgaacaggcgaaagccttaatggcgcaatatcgggtaccggtagtcgtggaagttattctcgagcgtgtgaccaatattagcatgggcagcgaactggataacgtcatggaatttgaagatatcgccgataacgcagcggacgcaccgactgaaacctgcttcatgcactatgaataagggagataaataatgttacgtttctctgctaatttaagcatgttatttggagaatatgattttctcgcccgttttgagaaagctgcgcagtgtggttttcgcggcgttgaatttatgtttccttatgactacgacattgaagaattaaaacatgtgctggcgagtaataaactcgaacatacgctgcacaatttaccggcgggtgactgggcggcgggggagcgcggtattgcctgtattcctggccgtgaagaagagtttcgggatggcgtagcagcagcgattcgttatgcccgtgcgctgggtaataaaaaaattaactgtctggtcggtaaaacgccggctggtttcagcagtgaacagattcacgcaacgcttgtagaaaacctgcgttatgccgcgaatatgctgatgaaagaagatattttattactgattgaacctattaaccattttgatattcctggtttccatctcaccggaactcggcaggcgctgaaattgattgatgatgttggttgctgcaatttgaaaattcagtatgacatttatcatatgcagcggatggaaggtgaattaaccaacaccatgactcagtgggctgataaaattggtcacctgcaaattgccgataatccgcatcgcggcgaaccgggaaccggagaaattaattatgattatctctttaaggtaatcgaaaattctgactacaacggttgggttgggtgtgaatataaaccccaaaccaccacggaagccggtttacgctggatggatccgtaccgttaaaacgtaacgctattcagacaatgcttttttaggccgctaagttggcaggggatcgtgttgtctgaattcaggaaaagcgaaatttaaaagaggttaattatgaaactgggatttattggcttaggcattatgggtacaccgatggccattaatctggcgcgtgccggtcatcaattacatgtcacgaccattggaccggttgctgatgaattactgagtctgggtgccgtcagtgttgaaactgctcgccaggtaacggaagcaagcgacatcatttttattatggtgccggacacacctcaggttgaagaagttctgttcggtgaaaatggttgtaccaaagccagcctgaagggcaaaaccattgttgatatgagctccatttccccgattgaaactaagcgtttcgctcgtcaggtgaatgaactgggcggcgattatctcgatgcgccagtctccggcggtgaaatcggtgcgcgtgaagggacgttgagcattatggttggcggtgatgaagcggtatttgaacgtgttaaaccgctgtttgaactgctcggtaaaaatatcaccctcgtgggcggtaacggcgatggtcaaacctgcaaagtggcaaatcagattatcgtggcgctcaatattgaagcggtttctgaagccctgctatttgctagtaaagccggtgcggacccggtacgtgtgcgccaggcgctgatgggcggctttgcttccagtcgtattctggaagttcatggcgagcgtatgattaaacgcacctttaatccgggcttcaaaatcgctctgcaccagaaagatctcaacctggcactgcaaagtgcgaaagcacttgcgctgaacctgccaaacactgcgacctgccaggagttatttaatacctgtgcggcaaacggtggcagccagttggatcactctgcgttagtgcaggcgctggaattaatggctaaccataaactggcctgatacccgcaataaaaatggccgatatcagaaaatgaatcggccagcaatattaaaaaagaaagcagccaaagatgttgctagtgtattaaaaataatatttttattttatttgttcctcatagctagattaaaacaacgttatagcatacgtgaaattaagagggatttatggaacatcagagaaaactattccagcaacgcggctatagcgaagatctattgccgaaaacgcaaagccagcggacctggaaaacatttaactattttaccttatggatgggtagcgttcataacgttcccaattatgtgatggtcggcggcttttttattctcggcttgtctacctttagtattatgctggcaattatcctcagcgcctttttcattgccgcggtaatggtattaaacggtgctgcgggcagtaaatacggtgtgccttttgccatgatcctgcgtgcttcttacggtgtacgtggtgcactgtttcccggattattaaggggcggaattgccgccatcatgtggtttggtttgcaatgttacgcggggagtctggcctgcttgattctgattggcaaaatctggccgggatttttaactctcggtggtgatttcactctgttaggcctttctctaccgggcttaattactttcttaatcttctggctggtcaacgttggtataggttttggcggtggcaaagttttaaataaattcactgccattcttaacccgtgcatctatatcgttttcggcggtatggcgatttgggcgattagtctggtcgggatcggtccaatctttgactacattccgagcggtattcagaaagcagaaaacggtggcttcctgttcctggtggtgattaacgcggtagttgcggtctgggcggcaccggcggtgagcgcatccgactttacgcaaaacgcccacagctttcgtgagcaggcgctggggcaaacgctgggtttagttgtggcctatattctgtttgcggtcgccggggtatgtattattgccggagccagtattcactacggcgctgatacctggaacgtgctggatattgttcagcgttgggacagcctgttcgccagcttctttgcggtactggttattctgatgacaactatctccactaacgcgaccggtaatattattccagccggttatcagattgccgccattgcaccgacaaaactgacctataaaaacggcgtactgattgccagtattatcagcttgctgatctgcccgtggaaattaatggaaaatcaggacagcatttatcttttcctcgatattatcggcggaatgcttggtccggtaattggtgtcatgatggcgcattattttgtggtgatgcgcggacaaattaatcttgatgaactgtataccgcacctggcgattataaatattacgataacggttttaacctcactgcgtttagtgtaactctggtggccgttattttatctcttggcggtaagtttattcactttatggaaccgttaagccgtgttagttggtttgtcggcgtcatcgtcgcctttgcggcctacgccttattaaagaaacgtacaacagcagaaaaaacaggagagcaaaaaaccataggttaattaatcccgatattgaacattgagttaaaaaccaatctgtattttacaaggagtttgttatgtcttttgatttaatcattaaaaacggcaccgttattttagaaaacgaagctcgcgttgtagatatcgccgttaaaggcggaaaaattgctgctatcggtcaggatctgggcgatgcaaaagaagttatggatgcgtctggtctggtggttagcccgggcatggttgatgcgcacacccatatttctgaaccgggtcgtagccactgggaaggttatgaaaccggtactcgcgcagcggcaaaaggtggtatcaccaccatgatcgaaatgccgctcaaccagctgcctgcaacggttgaccgcgctagtattgaactgaagttcgatgccgctaaaggcaagctgactattgatgcggcacaactcggtggcctggtgtcttacaacatcgaccgtctgcatgagctggatgaagtgggcgttgtcggcttcaaatgcttcgttgcgacctgtggcgatcgcggtatcgacaacgacttccgtgatgtaaacgactggcagttcttcaaaggtgcgcagaagctgggcgaactgggtcagccggtgctggtgcactgcgaaaacgcgctgatttgtgacgaactgggcgaagaagcgaagcgtgaaggtcgcgtaaccgctcatgactatgtggctagccgtccggtatttaccgaagtggaagcaattcgccgcgtactgtatctggcgaaagttgctggttgccgtctgcacgtttgccacgtcagcagcccggaaggtgttgaggaagtgactcgtgcacgtcaggaaggtcaggacgttacttgtgaatcctgcccgcattactttgtactggataccgatcagttcgaagaaatcggtactctggcgaagtgtagtccgccgatccgcgatctggaaaaccagaaaggcatgtgggaaaaactgtttaacggtgaaatcgactgcctggtttccgaccactctccatgcccgccggaaatgaaagccggtaacatcatgaaagcatggggcggtatcgccggtctgcaaagctgcatggacgtgatgttcgatgaagcggtacagaaacgcggtatgtctctgccaatgttcggcaaattaatggcgactaacgcagcagatattttcggtctgcagcaaaaaggccgtatcgccccaggaaaagatgccgacttcgtcttcattcagccgaatagcagctatgttcttaccaatgacgatctggaatatcgccacaaagtcagcccgtatgttggccgtaccattggcgcgcgtatcacgaaaaccatcttacgtggtgatgtgatttacgacattgaacagggcttccctgttgcgccgaaaggtcaatttatccttaaacatcagcagtaatctggcccctgcaatgcccgtccttgcggcgggcattctccggttaaggtgtgtttatgttcaattttgcagtcagccgcgaaagcctgttaagtggatttcagtggtttttctttattttttgcaacacggttgtggttcctcctacgctactttctgcttttcagttgccgcaaagtagcctgcttacgctcacgcaatatgcttttcttgctaccgcactggcctgcttcgctcaggcgttttgcggtcatcgtcgcgctattatggaagggccaggtggcctgtggtggggaaccatccttactatcacccttggtgaagcaagccgcgggacaccgatcaacgatatcgccaccagcctggcagtggggattgcactctccggcgtgctgacgatgttgattggttttagcggattaggccatcgcctggcacggttatttacgccgagcgtgatggtcttgtttatgttgatgctgggcgcgcagctgaccactatctttttcaaaggtatgctcgggctgccgtttggcatagccgacccgaattttaaaattcagttaccgccgttcgcgctcagcgtggcggtgatgtgcctggtactggcgatgattatcttcctgccgcaacgttttgcccgttatggcctgctggtcggcaccataaccggctggttgttgtggtacttttgctttccttctagccacagcctctccggtgagttgcactggcagtggttcccgctcggcagtggcggtgctttgagcccgggaattattctgacggcggtgattacaggtctggtaaatatcagcaatacctacggtgcgattcggggcacggatgttttttatccgcagcagggcgcagggaatacgcgttatcgtcgtagctttgtggcgaccggatttatgacgctgataaccgtaccgctggcggtaattccatttagtccgtttgttagttccattggtttattaacccagactggcgattacacgcggcgtagctttatttatggcagcgttatttgcctgctggtggcgctggttcctgcactcacgcgactgttttgcagtatccctttacccgtgagtagtgcggtcatgctggtttcttatctgcctttactcttttccgcgctggtgtttagccagcaaataacgtttaccgctcgcaatatttatcgactcgcattgccgttatttgtcggcatatttttaatggcattaccgcctgtgtatctgcaagaccttccattaacgcttcgtcctctgctcagtaacggcttattggtcgggattttactggctgttcttatggataaccttattccgtgggaacgcatcgaataatttgttgaaaaaggattgataatgaagattgtcattgcgccagactcttttaaagagagcttaagtgcagaaaaatgttgtcaggcaattaaagccgggtttagcaccctctttcccgatgcgaactatatctgtttgccgatagcggatggcggcgaagggacggtggatgcgatggtcgccgcgacgggcggcaacatcgtgacgcttgaagtctgcgggccgatgggcgaaaaagtgaatgctttttatggccttaccggcgacgggaaaacggcggtgattgagatggcggcagcaagtggcctgatgctggtcgcgcctgaaaagcgtaatccgttgctggcctccagttttggtacgggggagttaattcgtcatgcgctggataacgacattcgccatattattctcggcattggcggcagtgcgacggtcgacggcggtatgggcatggcgcaggcgctcggtgtgcgtttccttgatgccgacggtcaggcgctggcggcaaacggtggtaatttagcgcgcgtggcaagcattgagatggatgaatgcgatccgcgtctggcgaattgccatattgaagtagcatgtgacgttgataacccgctggtaggggcacgcggcgcggcggcggtgtttggcccgcaaaaaggggcaacgccggagatggtcgaagaacttgaacaggggctgcaaaattacgcccgtgttttacaacagcaaactgaaattaatgtctgccagatggcgggcggcggcgctgcgggcggtatgggtattgcggcggcggtatttctcaatgcggatattaaaccgggcattgaaattgtgttgaatgcggtcaatcttgcgcaggcagtgcagggcgcagcactggtgattaccggggaagggcgcatcgacagccaaacggcaggcggtaaagcgccgctgggtgtggcgagcgtggcgaagcagtttaatgtaccggtgattgggattgctggcgtattgggtgatggcgtggaagtggtgcaccagtacggcattgacgcggtattcagcattttgcctcgtctggcacctttagccgaagtgctcgccagcggtgaaaccaatctcttcaacagcgcgcgaaatattgcctgcgccattaaaataggtcagggaattaaaaactaacccttacctttaaagcggatgcgatttatatcgcataagagtgcagtactcatgccggatgcggcatgagtaccatatccttcctgaaaatcgcgcaaattctatatattgcagagatcatgtaggcctgataagcgaagcgcatcaggcaatgttacaaaaaaagccacggtataaaccgtggcaaaatccaacatagctaaaaataatcaggcgagtggtatgacttaaatctctacgtcgcggttacaatctttgctgtaaatatagctgaacgcttcaccacgccctacaccataaccagcctgtaaagaataagcgcccataaagatgtaatcgccttttttcaccgggatccagttattgtcgaggttataaaccccctgaccggaaagaatataggcaccgtgttcctgaacgtgtgtttcgatataaccgtggctggcacctggtgcaaaagagaggatatgcatgttcatatcaaaacctaactctttgggcagaaaatccagcagaataacatcgtccatgccttcataatgaatgcgttccagttcgctggcattgccagaaaccagccacggtgcatagccttctaccggaacatagcggcgcttatataaaaagatttggctgtcttcggcctgggcgttaacaaacgtcattaaggagcctggcgggcaataaagatagccaccttcgcttaaggcaaatgttttgccttcggctttggcagtgatatttccagagatcacatacaggaacgtttcaatgccttcgccaccgaagccctgttggttgccaccgttttgatgcagtgtgaccagataatcaacaaaagaggcacccagctttggcgtggagaggattgtcgcgtcacaattttcaaagcccggaataatattttttaccagaccatccggggttaacagtgcgaaattaccgtgtttaacaatcgcacggttagccagtaaatcttcgcggtaaccggtgacgttatttaaatatcccatttatgactccttatttctgccaggcaagttgataaagcatgagtgccaacgttttgaccccttcggcaaggtcggtaatattggtgcgttccgccgggttatggctgatcccgttgatgctggggataaaaatcatgcaggttggtacgcgaggcgcgaaaatttgcgcgtcgtgcccggcaccactgtgcatcacccggtaattcagtttttctctttcacacaattctgtcagggtggcgaccagctccttattcatcggcacgggttcttcgtccatccataaatcgatatcaataccaatgtccatttcatcgcaaatcgcccgcatgtcgttttctaactgttgggtgaaatcgcgcagcacggcagcgtcggtatgacgacaatcaatggtgaacgtggttttacccggcaccacatttaccgtattcgggcgcggctctactttgccaaaggtcagaaccagcggatcgcccatccttttcgctttttcgacgctctgatggcaaatgcgactgaaagcgtaaactgtatcacgacgataacccatcggcgtggtgcctgcatggttactttcgccgttcagcgttaccgtataacgacgctgcccgacaattgcattcaccacgccaatactttgcccattactttccagcacacagccctgttcaatatgcagttcaacaaaggctttaatatcctgacgcggagttagtggggcgttcggaagagtaaatccgcaagccttcatcgcatcgacaaaactatttcctttggcatcacagatattccgcacgtcgtcaggattcgccagcccaaaaatatttttactgccccagaagacatacgggaagcggctgccttcttcttctgccatcgccaccacttcgaccgtacgtagcggcgcgccgtattgcgttttcagccagtcaattgccagccacgccgccagcgcgccgaattgcccgtcaaggttaccgccgttaaccacggtatcgatatggctaccgctcagaaccacttcctgtggatattcggtgccattcaggcgaccgtataaattccccacttcatcgaaacgtgtttccagcccgcttgctgccattctttttttaaattgctgctgggtttccagccattccgggctataaagtaaacgggtcatcccacccgctgggtcagcgccaaaagaggaaagccagggcagcgtttcttctatagcttgacggaaatgtgtaatcataagaaagtcctgtctcaataattattgcgcaaagggatttttcgtttcgtaactcgtgttataaagcgcgtcggaaattaaatactggtaaatatcatcaacaatttcgatgccttcgacggcggctttgcgttgtttaatatcctgatcctgtccgggataataaacctgattaaaaccgggcgcgggggtaatggcatttaattcgcgcatggtctggctaagatgttgacggaataattcgctggaggagaaaaagttcggattaataactatatgtaattgccccaaattacgccctgcgtgtaaatcgtcatacatgctactaacctgtcgcccgaacggtaagccgagtaagacgccactgaggacgtcaatcatcatcatcaggccatacccttttggcccggcggcggggagcagagcatgtaccgcgaacggatcggttgttggtacaccgtttttatcgaccgcccaggtatccgggatagacatattacggctgcgggcgtcgagcacttttccccatgcctgtacggtagtcgccatatcaaaggtaaggatctcgtcgccttctcccggcgcggcaaaggccagggggttagtaccgtagtaaatttccgcgccgccaaacggcaccaccattggatcggactggcacatgctaatgccaatgaatccggcgcgggctgcctgctgcacaaaataagagattgcgccgctgtgacccatccggctgataccgaccaccgcaacgccattttgctgggcggttttgatggcatgttccatacccattttcgccgcgacctgtccggcggcattgtcggcatgtaaaattgcgctgcacggcccggtttcctcaagacgaaactccggttcgcggttggtgccgcctttactaatgcgttccgcgtagtattccacgcgcaccgcgccatgagagtggatccctctggcatcggcgtaaaccaatacttcagccacggttgcagcgtgctcacgttttaacccagcctggcagagtttattctcaattagctggtggagtgtttcccgactgattttcatctgtcttcctttttaacgacggtgtgaagcatgactgcaattaacatacagggaaaatatctggattatgtgatccagacaggcaaaaaaatatagttagaatttatttgataatccgctcacttttaacctgatttttaaaacaacaacgcttattaaaaaataatgagtaatagcctggtggttatttgaattcttttgttaataattcctgtgtgatattcatcaccttatttactcgttgtcatcgataccgtaatcgccacattaacactgctcgtgcaattgccatgggtgcaatttttaaggagttgttatgatccacgcctttattaaaaaagggtgttttcaggatagcgtcagtttaatgattattagtcgaaaactcagcgaaagtgaaaatgttgatgatgtttccgtaatgatgggtacgcccgccaataaagcgttattagataccacaggtttctggcatgacgattttaataacgccacgccgaacgatatttgcgtggcaattcgtagcgaagcggcggatgcggggatcgcgcaggcgattatgcagcagcttgaagaggcgctaaaacaactggcgcaggggagtggcagcagccaggcgttgacgcaggtgcgtcgctgggacagtgcctgtcagaaattacccgatgccaatctggcgctgattagtgtggctggcgagtatgcggcggagctggcaaaccaggcgctggatcgcaacctcaacgtgatgatgttctccgataacgtcacgctggaagatgaaatccaacttaaaacccgcgcgcgggaaaaaggcttgctggtgatggggccggactgcggtacgagcatgattgccggcacaccgctggcttttgctaacgtgatgccggaaggcaatattggcgtcattggcgcttccggtaccgggattcaggagctgtgtagccagattgcgctggcaggggagggaattactcacgcgattggccttggcgggcgcgacctcagccgtgaagtgggcggcatcagtgcgctaacagcgctggaaatgctcagtgcagacgagaaaagcgaagtgctggcatttgttagtaaaccacctgccgaagctgtgcgtctgaaaattgttaatgccatgaaagcaaccggcaaaccgacggtggcgctgtttttaggttataccccggcggtggcccgcgacgagaatgtctggtttgcctccagcctggatgaggccgcacgcctggcttgcctgcttagtcgcgtcacggcgcgacgtaacgcaatagcgcctgtcagcagcggatttatttgcggtttgtataccggcggtacgctggctgccgaagcggcgggattacttgccggacaccttggcgtggaagccgacgatacccatcaacatggcatgatgctggacgccgatagccaccagattattgacctcggcgatgatttctacaccgtcgggcgtccccatccgatgatcgacccaaccttacgcaaccagttaattgccgatctcggcgctaaaccgcaagtgcgcgtgttgctgcttgatgtcgtgattggcttcggtgcgaccgccgatcctgccgccagcctggtgagcgcctggcaaaaagcctgtgccgcgcgtttagataatcaaccactgtatgccattgccacggtgacaggcactgaacgtgacccgcaatgccgcagccagcaaatcgccacgctggaagatgcggggattgcggtcgtgagtagcctaccggaagccaccttgctggcggcagcgttaattcatccgctcagccctgccgcacagcaacacacaccgagtttactggaaaacgtcgccgtgattaacatcggattacgcagctttgcgctggagctacaaagcgccagcaaaccggttgtgcattaccaatggagcccagtcgccggtggcaataaaaaactggctcgtttattagaacgtttgcaataaggggttcccatgtttacatcagtggcgcaagccaatgctgcggttatcgaacaaattcgtcgcgctcgtccacactggctggatgtgcaaccggcttcttcacttatcagcgaactaaacgagggcaaaacactgcttcacgccgggccgccaatgcgctggcaggagatgaccggacccatgaaaggggcgtgcgtgggcgcatgtctgttcgaaggttgggcgaaagatgaagcgcaggcgctggcaatactggagcagggggaagtgaacttcattccttgtcaccatgtgaatgccgtcgggccaatgggcggtattacttctgccagtatgccgatgctggtggttgagaacgtgaccgacggcaaccgggcgtactgcaacctcaacgaaggtatcggcaaagtgatgcgttttggcgcttacggcgaagatgtcctgactcgccatcgctggatgcgcgatgtgttaatgccagtattaagcgcggcgctggggcgcatggagcgcggtatcgatctcacggcgatgatggcgcagggcattacgatgggcgatgagttccatcaacgcaatattgcttcctctgcactgttaatgcgtgcgctggccccacaaattgctcgcctcgatcatgataaacagcacatcgccgaagtgatggatttcctcagcgtgaccgatcagttcttcctcaacctcgcgatggcttactgcaaggcggcgatggatgctggcgcgatgatccgcgcaggcagcatcgtcacggcaatgacccgcaacggcaatatgttcgggattcgggtaagcgggctgggcgaacgctggtttactgcgcctgtaaacactccgcaaggtctgtttttcaccggcttctcgcaggagcaggcgaacccggatatgggcgatagcgcgattaccgaaacctttggtatcggaggtgcggcaatgatcgcagcgcctggcgtaacgcgctttgtcggtgcgggtggcatggaagcggcaagagcggtatctgaagagatggcggaaatttaccttgaacgcaatatgcagttgcagatcccaagctgggattttcagggcgcgtgcctggggctggacattcgtcgcgtggtagaaaccggcattacgccactcatcaataccggtatcgcccataaagaggcggggatcgggcagattggcgcaggcaccgtgcgggcaccgctggcgtgctttgaacaggcgctggaagcactggctgaaagcatgggtattggttgaggaacgcgcaatgacgatcatccatcctctgcttgccagtagtagcgcaccgaattatcgccagtcctggcggttagcgggagtgtggcggcgggcgattaacctgatgacggaaagcggcgaactgttaacgttgcatcgtcagggtagtggtttcggccccggaggatgggtgcttcgccgtgcgcaattcgatgcgttatgcggtggattatgcggcaatgaacgaccacaggttgtggctcaagggattcgcctcgggcgtttcacggttaaacagccacagcgttattgtttgctgcgtattacgccgcctgcgcatcctcaaccacttgcagctgcatggatgcaacgcgcggaggaaaccgggcttttcgggccactggcgttggcggcaagcgatccgctgcctgctgagttacgccagtttcgtcactgttttcaggccgcgctcaatggcgttaagaccgactggcggcactggctgggtaaaggccccggattaacgccgagtcatgatgacacgctgagcggaatgctgctggcggcctggtattatggcgctttagatgcgcgctccggtcgtccgttttttgcctgttccgacaatctgcaactcgttaccacagcggtgagcgtcagttatttacgttatgccgcgcaaggatatttcgccagcccactcctgcactttgttcatgctctgagttgcccgaaacgtaccgctgttgcgattgatagcctgctggcgctggggcatacgagtggggcagatacgctgctggggttctggcttggccaacaattattacaaggaaaaccatgaaaacactggttgtggctcttgggggcaacgccttactccagcgcggtgaggcgctgacggcagaaaatcaatatcgcaatatcgccagtgctgtacccgcgctggcacgcctggcccgttcttatcggttggcgattgttcacggcaacgggccgcaggtggggctgctggcattgcagaatctggcgtggaaagaggtagaaccgtatccgctggatgtgctggttgcggaaagccaggggatgattggctatatgctggcgcagagtttgagcgcacagccgcagatgccgcccgtgacgacggtgctgacgcgcattgaggttagccctgatgatccggcgtttttgcagccagagaaatttattggtccggtttatcagccagaagaacaagaggcactggaagcggcttacggctggcagatgaaacgtgatggtaaatatttgcgccgggtggtggcgtctccgcaaccgcgtaaaattctcgacagcgaagccatcgagttgttgctcaaagaggggcatgtggtgatttgcagtggcggcggcggtgtgcctgtgacggatgacggagcagggagtgaagcagtgattgataaagatctcgccgctgcgttgctcgccgagcagattaatgcagatggactggtgatcctcaccgatgctgatgcggtatatgaaaactggggaacgccgcagcaacgtgccattcgccatgccacaccggatgagttagcgccatttgccaaagccgatggtagcatggggccgaatgtaacggcggtgagtggttatgtcagaagccgtggtaaacccgcgtggattggggcgttaagccgaattgaagagacgctggcgggcgaagcggggacctgtattagcctgtaatcgtaggcattagacatttgtgcctgatgcgacgcttgacgcgtcttatcaggcctacaaccggtgccgcatccggcaattggtgcacaatgcctgatgcgatgcttgacgcatcttatcaggcctacaatgggtaccggatcggtaggccggataaggcgtttacgccgcatccggcaagaatagagcaccagttaaccgaacttactctgcgcccaaatcacgccgctggcatattccggcggcagcagcgggattaaggcttccagcgtcgcagtcagacggcttgtgtcgctgtcggtcaaattcagatgccccactttacgccccggacggacttctttgtcgtaccagtgcagatgcaccagcggcagtttcagccagtcataattcacatcgctaccaatcagattgatcatcacgctcggattattcaccactggttgcggtaacggcagatcggtaatcgcccgcagatgcagctcaaactggctgatgctggcaccgttttgtgtccagtgaccgctgttatgcacacgcggtgccagttcgttgatcaacagaccttgcggggtgacaaaacactccatcgccatcacgcccacatagcccagctcctgcataatcgcgctcagcatctcttcggcttgcgcctgctgctgtgcgttggcctgcggaaaagcgacgctggtgcgcaaaataccgtcctgatgcaggttatgcgtcagcggataaaacacggtgctgccatcaaagccgcgcgcgccaaccaggctcacttcaccagagaagttaatgccctgctcgacaatacattcgccgtaacactctgccggtaactgttcggtttcatttgcgcgtaaacgccattgaccgcgaccgtcataaccaccagtgcgacgcttaacaatcgccagctcacctaaacgatcaaacaccgcaggccactcgctgcgttcggcaagtaactgccacggtgcagtcggcaggtggagcttatcgaaaagctgcttctgagtcagacggtcagcaataatcgggaacacatcgcggttcacaaaggccggatggcgcgccagctcgcgggttaatgcggtttccggccagcgttctatctcagcggtaatcacgctttgttgaaaaggcaccgccgccggttcagcgtccagcccgactggccagacagcaatgcctaacggttcgcctgcctgacgcagcatacggcctaactgcccgttaccgaggacgcaaacctgtttcatgccgcacctcgcgggtccgggttttccagcacttcgtcggtctgggctttgcgccagtcattcagacgctggtgcagttctttatcatgagtcgcaagaatttgtgctgccagtaacgccgcgtttgccgcgccagctttaccaatcgccagcgtacccaccggaatgccgcgcggcatttgtacgatggagtagaggctatcgacaccgctcagtgcggcgctctgtactggcacgcccagcaccggcaccagcgttttggcggcaatcatgcctggcagatgcgctgcgccgcctgcgcccgcaataatcacctgataaccgttctcttcggcgctttcggcgaagctgaacagtttatcgggggtgcggtgagcagaaaccacttcaacgtggtgcgggacattcaggatttcgaagatttcggcggcgaactgcatggtagcccagtcgcttttggaccccatcacgatggcgacacgcgccggattattgcgggaagacatgcgtcttaaaactcctgtggtgcacaactctcggctttagagggcacagagaatagcacggaaagagagcaaggaaaacggttgcgtggctgtgaaatcagcaaagttgcgggttttttaaaacggaaaatgaatcagctcaacgtcatccgccgtgactttcaccatactaccttccgtatgccaggcacccagtaccacgcgaaaagcaggttgctgattggcgataagttcatgcaccgccgggcgatgggtatgcccgtggatcagccattgcacctgatgtttttccatcgcactgaccaccgcgttttggttaacgtccatgatcgccaggcttttactgctgttggcttctttgctgttcgcgcgcattcgcgcggcaatgcgtttgcgcacaaacaacggcagggcgaggaatagcgtctgcagccagggtttgtggaccttggcgcgaaaagcctgataacccgcgtcatcggtgcacagcgtgtcgccatgcataatcaacacccggcgaccataaagttcgagcaccttttcttccggcaataacgtcatgccactttcacgggcaaagcgtttgccgagcagaaaatcacggttgccatgaatgaaataacagggaacgccggaatcggacaccgctttgatcgccgccgccatcttgcgatggagtgggttgggatcgtcgtcgccaatccatgcttcaaacagatcgccaagaatatacagcgcgtcggccttgcgggcttcccccgctaaaaaacgcagaaaaccggcggtgatcgccggttcttccacgcagagatgaagatctgcaataaagagtgtcgccacgattactcgctaacggtcacgctttcaatgataacgtcttcttttggcacgtcctggtgcataccgctacgaccggttgcaacacctttgattttgtctaccacgtccatgccgtcaaccacttcagcaaacacgcagtagccccaaccttgcaggctttcgccagagaagttcaggaagtcgttatcaaccacgttgatgaagaactgtgcagttgcagagtgcggagcctgagtacgtgccattgccagcgtaccacgggtatttttcaggccgttgttggcttcgtttttgatcggttctttggtggctttttgtttcatgcccggttcaaaaccgccgccctgaatcataaagccgttgataacacggtggaaaatggtgttgttgtaaaaaccttcgcggcagtagtccaggaagtttttaactgtttcaggtgctttatcgtcaaaagttttgatgacaatatcgccgtgattggtgtggaaagtaaccatttttgcatcctgttccgtttgattggtgcttcaacccagttcgggtcatatatagggtggtgttatagcataaccgcacgatcggatcatcacgcaatgtatgctgattcgcgcgggaaatatgggtattatacgcaactcaattacccacacatgtctaaacggaatcttcgatgctaaaaatcttcaatactctgacacgccaaaaagaggaatttaagcctattcacgccggggaagtcggcatgtacgtgtgtggaatcaccgtttacgatctctgtcatatcggtcacgggcgtacctttgttgcttttgacgtggttgcgcgctatctgcgtttcctcggctataaactgaagtatgtgcgcaacattaccgatatcgacgacaaaatcatcaaacgcgccaatgaaaatggcgaaagctttgtggcgatggtggatcgcatgatcgccgaaatgcacaaagattttgatgctttgaacattctgcgcccggatatggagccgcgcgcgacgcaccatatcgcagaaattattgaactcactgaacaactgatcgccaaaggtcacgcttatgtggcggacaacggcgacgtgatgttcgacgtcccgaccgatccaacttatggcgtgctgagccgtcaggatctcgaccagctgcaggcaggcgcgcgcgttgacgtggtcgacgacaaacgcaacccaatggacttcgttctgtggaagatgagcaaagagggcgaaccgagctggccgtctccgtggggcgcgggtcgtcctggctggcacattgaatgtagcgcaatgaactgcaagcagctgggtaaccactttgatatccacggcggcggtagtgacctgatgttcccgcaccacgaaaacgaaatcgcgcagtccacctgtgcccatgatggtcagtatgtgaactactggatgcacagcgggatggtgatggttgaccgcgagaagatgtccaaaagcctgggtaacttctttaccgtgcgcgatgtgctgaaatactacgacgcggaaaccgtgcgttacttcctgatgagcggccactatcgcagccagttgaactacagcgaagagaacctgaagcaggcgcgtgcggcgctggagcgtctctacactgcgctgcgcggcacagataaaaccgttgcgcctgccggtggcgaagcgtttgaagcgcgctttattgaagcgatggacgacgatttcaacaccccggaagcctattccgtactgtttgatatggcgcgtgaagtaaaccgtctgaaagcagaagatatggcagcggcgaatgcaatggcatctcacctgcgtaaactttccgctgtattgggcctgctggagcaagaaccggaagcgttcctgcaaagcggcgcgcaggcagacgacagcgaagtggctgagattgaagcgttaattcaacagcgtctggatgcccgtaaagcgaaagactgggcggcggcggatgcggcgcgtgatcgtcttaacgagatggggatcgtgctggaagatggcccgcaagggaccacctggcgtcgtaagtaattgcgctattgccggatgcgagttttcgcatccggttatcgtctgcgccaccacaacattcccatcagtagcatccccggcaaccacacccacatcaattcagaaataatcacctgatgcccgtacggcgtggtgtaacgagacaatgcaaacggcgcgacttttatcacctgccagggagcgaaaaagcgttcatcactccacggccacagccagccaacgcctttaccgccagtggttacgctatccagcaagctgtggcttagcaagctgacggttaaaaacagccagcagcgaatcagcccagccctgaaccatcggcgtccaataaacacacataacagcgggacaacaaacgcaaacaccaggctatgggtaaacccgcgatgaccaaaaacattgccgtaagcaacgccaaatttaaagctcaatacgtcggcgtcgggcagcatcgccaggatgattccggcaaataacagacgcggagggatgactttgctacccaaccctaaaccaatgcataggggaacggcggcgtgcgtaataacggttggcatgatggtcgcttcggcaaaatgtcgatgctatcagcatggatgaacggggcgtagagggcaaaagtctgaaaagagaaccggcctgttgatacaggccgggaaagggatcaggcaacaacctgtacgctgtgacctgcaaaactcactgtctgaccggcgacgattttgcagcgtttgcgcgtttcaaccgcaccgtcgactttcacctggccttcggcaatcgcgattttcgcctgcgcgccgctttcgctccagccttccagtttcagcaagtcgcacagctcaacgtgcggatgtttacctaaagaaaatgtcgccatgttactcatcctgtggatcatgatattcaacgcacgcctgtagcgtgttttcaatcagcgtggcaaccgtcatcgggccaacgccgccgggaacaggcgtaatgtaactggcgcgtttagccgcgtcttcaaacacgacgtcgcccacaactttgccattttccagacggttgatgccgacatcaatcacaattgcgccttctttgatccagtcaccgggaataaagcctggcttgccaacggcaacgatcaatagatcggcattttctacgtgatgacgcagatttttagtgaagcggtgagtcactgtagtggtgcaacctgccagcagcagttccatgctcatcgggcggccaacgatattgcttgcgccaatcaccacggcgttgaggccgaaggtatcaatgttgtaacgctcaagcagcgtgacgataccgcgcggggtgcagggacgcagacgcggcgcgcgctggcacagacgaccgacgttgtaaggatggaaaccgtccacgtctttgtccggatgaatacgttccagcactttgacgttatcaatacccgccggtaacggcagttgaaccagaatgccatcgatggtgttgtcggcattcagcgtatcgataagctccagcagctccgcttcgctggtggtttccgggaggtcataagagcgggagacgaacccgacttcttcacaagccttgcgtttgcttgcgacataaatttggcttgcagggttactacccaccagcacaacggccagtcctggtgcccgcagtccggctgcaatacgcgcctgaactttttgagcaacttcagagcgcacctgctgcgcaatcgttttaccgtcaataatctttgctgccatcagagagaggattccatctgttacgtagatcgaaggggatgcgcctattttgtcagaagcggggcgcgctgtcaggtttcgtttcagatttatcgcgtgaagcgacctcttgcgaaggtgaggcgcaccgtcgctgagactgaaagcttcatttttcgtccatgatggcgttgtaaatctggaactgatttatttccttgtctaaggattaagataatttaagaaatacctgacaatataaaaagaattttcagcctggtaatttaccgcttcaggtctatatttgtgttgaatatattttgcgcggaagtattcatctaacggggctctctattttttagaatagagtgcatattttcaattaagacattcttagaggataaaaaggaatttactactatcagtgtcttaaataaagtaatcggttatatacggatgtggagtcgataaatgagattgaaggaatatatatgaaattaagatttattagctctgcgctggctgccgcactattcgccgctacgggtagttatgctgccgttgtagatggcggtacaattcactttgaaggcgaactggtgaatgctgcctgtagtgtgaatactgacagcgcagaccaggttgtcacactcggtcaatatcgtaccgatattttcaatgctgttggtaatacctctgcattaattccattcaccattcagttgaacgactgcgatcctgttgttgccgctaatgctgccgttgcattttctggtcaggctgatgcaatcaatgataatttattggccattgcatccagtaccaatacaacaacagcaacgggtgtcggtattgaaatacttgataatacatccgcaattctcaaacctgatgggaatagcttcagtaccaaccagaacttgatccccgggaccaacgttcttcatttttctgcacgttataaaggcaccggtacaagtgcaagtgcagggcaagcaaatgctgacgcgacttttattatgagatatgaataatcaaaaccacgttgttttgaattatatatcacgtcttataacaaagtaatgtaccggttgtctgaagcggtatggtggcaatgtaaatcgaaatcatgttcactttgtatcatgccgctttattaaatgaaaagggaatgatgtgttgtaagaaaccaaagcaatcatttctttatattccttatttttgccgtcaggaatacacaaggcgtattaactatgatgactaaaataaagttattgatgctcattatattttatttaatcattagcgccagcgcccatgctgccggagggatcgcattaggtgccacgcgtattatttatcccgctgatgctaaacagactgcggtatggattagaaatagccataccaatgagcgctttctggtcaatagctggattgaaaacagcagcggtgtaaaagaaaagagtttcatcattacaccgccactgtttgttagtgaacccaaaagcgaaaatactttgcgtattatttacaccggtccaccgctggcagcagatcgtgagtctctgttctggatgaatgttaagacgatccctagcgtagataaaaatgcattgaacggcaggaatgttttgcaactggcgattttaagccgcatgaaattatttctccgtccaattcaattacaagaattacccgcagaagcgccggacacactcaagtttagccgatccggtaactatatcaatgttcataatccaagtcctttttatgtcaccctggttaacttacaagtgggcagccaaaagttggggaatgctatggctgcacccagagttaatagtcaaattcccttacccagtggagtgcagggaaagctgaaatttcagaccgttaatgattatggtagtgtaactccggtcagagaagtgaacttaaactaaccgaatcatctgacaatatcagagctaattatgaaaatacccactactacggatattccgcagaggtatacctggtgtctggccggaatttgttatagttctcttgccattttaccctcctttttaagctatgcggaaagttatttcaacccggcatttttattagagaatggcacatccgttgctgatttaagccgctttgagagaggtaatcatcaacctgcgggcgtgtatcgggtggatctctggcgtaatgatgagttcattggtagccaggatatcgtatttgaaagcacaacagaaaatacaggtgataaaagtggtgggttaatgccctgttttaaccaggtacttcttgaacgaattggccttaatagcagtgcatttcccgagttagcccagcagcaaaacaataaatgcatcaatttactgaaagctgtacctgatgccacaattaactttgattttgcagcgatgcgcctgaacatcactattcctcagatagcgttgttgagtagcgctcacggttacattccgcctgaagagtgggatgaaggtattcctgctttactcctgaattataatttcaccggtaacagaggtaatggtaacgatagctatttttttagtgagctcagcgggattaatattggcccgtggcgtttacgcaacaatggttcctggaactattttcgcggaaatggatatcatagtgaacagtggaataatattggcacctgggtacagcgcgccattattccgctgaaaagtgaactggtaatgggagacggcaatacaggaagtgatattttcgatggcgttggatttcgtggtgtacggctttattcttctgataatatgtatcctgatagccagcaagggtttgccccaacggtacgtgggattgcccgtacggcggcccagctaacgattcggcaaaatggttttattatctatcaaagctatgtttcccccggcgcttttgaaattacagatttgcacccgacatctagtaatggcgatctggacgtcaccatcgacgagcgcgatggcaatcagcagaattacacaattccgtatagtacagtgccaattttacaacgcgaagggcgtttcaaatttgacctgacggcgggcgattttcgtagcggtaatagtcagcaaagtagccctttcttttttcagggtacggcactcggcggtttaccacaggaatttactgcctacggcgggacgcaattatctgccaattacaccgcctttttattagggctggggcgcaatctcgggaactggggcgcagtgagcctggatgtaacgcatgcgcgcagtcagttagccgacgccagtcgtcatgagggggattctattcgcttcctctatgcgaaaagcatgaacaccttcggcaccaattttcagttaatgggttaccgctatagcacacaaggtttttatacccttgatgatgttgcgtatcgtcgaatggaggggtacgaatatgattacgacggtgagcatcgcgatgaaccgataatcgtgaattaccacaatttacgctttagccgtaaagaccgtttgcagttaaatgttagtcaaagtcttaatgactttggcagcctttatatttctggtacccatcaaaaatactggaatactagcgatagtgatacgtggtatcaggtggggtataccagcagctgggttggcatcagttatagcctcagttttagctggaatgaatctgtagggatccccgataacgaacgtattgtcggacttaatgttagtgtgcctttcaatgttttgaccaaacgtcgctacacccgggaaaatgcgctcgaccgcgcttatgcctcctttaacgccaaccgtaacagcaacgggcaaaatagctggctggcaggtgtaggtgggaccttactggaaggccacaacctgagttatcacgtaagccagggtgataccagcaataatgggtacacgggcagcgccacggcaaactggcaggccgcttacggtacgctggggggcgggtataactacgaccgcgatcaacatgacgttaactggcagctgtctggcggtgtggtcgggcatgaaaatggcataacgctgagccagcctttaggggataccaatgttttgattaaagcgcctggcgcaggcggtgtacgcattgaaaatcaaactggcattttaaccgactggcgcggctatgcggtgatgctgtatgccacggtttatcggtataaccgtatcgcgcttgataccaatacgatggggaattccatcgatgttgaaaaaaatattagcagcgttgtgccgacgcaaggcgcgttggttcgtgccaattttgatacccgcataggcgtgcgggcgctcattaccgttacccagggcggaaaaccggtgccgtttggaagtctggtacgggaaaacagtaccggaataaccagtatggtgggtgatgacgggcaagtttatttaagtggtgcgccattgtctggtgaattactggttcagtggggagacggcgcgaacagtcgctgcattgcgcactatgtattgccgaagcaaagcttacagcaagccgtcactgttattagcgcagtttgcacacatcctggcagttaaaggaaattatcaataagataatctgcagattattattggcgatggcatgtttgtgtctggcaaacatatcctgggctactgtttgtgcaaatagtactggcgtagcagaagatgaacactatgatctcagtaatatctttaatagcaccaataaccagccagggcagattgttgttttaccggaaaaatccggctgggtaggtgtcagtgcaatttgtccacccggtacgctggtgaattatacataccgtagttatgtcaccaactttattgttcaggaaactatcgataattataaatatatgcaattacatgattatctattaggtgcgatgagtctggttgatagtgtgatggatattcagttccccccgcaaaattatattcggatgggaacagatcctaacgttagccaaaaccttccattcggggtgatggattctcgtttaatatttcgtttaaaggttattcgtccctttattaacatggtggagatccccagacaggtgatgtttaccgtgtatgtgacaagtacgccttacgatccgttggttacacctgtttataccattagttttggtggccgggttgaagtaccgcaaaactgcgaattaaatgccgggcagattgttgaatttgattttggtgatatcggcgcaagcttatttagtgcggcagggccgggtaatcgacctgctggtgtcatgccgcaaaccaagagcattgcggtcaaatgtacgaatgttgctgcgcaggcttatttaacaatgcgtctggaagccagtgccgtttctggtcaggcgatggtgagcgacaatcaggatttaggttttattgtcgccgatcagaacgatacgccgatcacgcctaacgatctcaatagcgttattcctttccgtctggatgcagctgcggcagccaatgtcacacttcgcgcctggcctatcagtattaccggtcaaaaaccgaccgaagggccgtttagcgcgctggggtatttacgcgtcgattatcaatgaggtacggagaatgagaagagtactctttagctgtttctgcgggctactgtggagttccagtggatgggcagttgaccctttaggaacgattaatatcaatttgcacggtaacgttgttgatttctcctgtaccgtaaacacagcggatattgataagacggtagatttaggcagatggcctacgatacaactactgaacgctggcgataccacggcactcgtcccttttagcctgcggctggagggatgtcctccgggtagtgttgcgattttatttacgggaacgccggcatccgataccaacctgctggctctggatgatcccgcaatggcacaaaccgtcgccatcgaattacgtaatagcgatcgctcccggctcgcactgggggaggcgagcccgactgaggaagtagatgcaaatggcaatgtcacactaaacttttttgccaattatcgagcgttagccagcggtgttcggccaggtgtggcgaaagcggatgcgatatttatgatcaattataattaatattatattaattcgtataatttggcgtagtcgataagctctacaatactatgcaaacctagcttgccataaatattagatttatgcgcactaactgttttattgctaagtaataacttatcggcaatttctttattagataatccgctaaccagataacgtaatatggtcacttcacgattagatagcacagtgaccgtactactattcgtactacatttattgctttttatatagttaagcgtttcgctgggaaaaaacgtgtatccggagaggatcatctgaacggcatgaaaaatatcattctgatcattgcatttactgacaaaaccgttagcaccagcttgtatcgctctgccagcataaaagcattcacttttgctacttaaaaataacactttcactgtgctctggatttgtttgatccttttcaggaaggtaaaaccgtctgttccgggcaagtctatatccataatgattaaatcaacaggacgggttcggagataatcgatggttatgcgataatcatccgttttcaggacaatctgcaattcactgtttttttgcaacagaacttcaatagacattctgatgataggatgagtatccataatgatcacgctcgttggtttcatagttaccagtctcataggagcggacaattttccgttaggtcgggaaattgtactttgatacatgaaaatacgggttttcttgattcagacgcgcagcggtgtgcgtttgtttgccgctatagcgaaataaatcagaaaatcagacgcggtcgttcacttgttcagcaaccagatcaaaagccattgactcagcaagggttgaccgtataattcacgcgattacaccgcattgcggtatcaacgcgcccttagctcagttggatagagcaacgaccttctaagtcgtgggccgcaggttcgaatcctgcagggcgcgccattacaattcaatcagttacgccttctttatatcctccataatttcagagtgggacatatttgggacattatcaccaaaaatgtcgtctattttcctcgcatgctctgtcaaatgattaggcgcaaggtgagcatacctacgaaccatttctatggactcccatccgcccatttcctgaagcactgataatgggacgcctgactgaatcagccagcttgcccaggtgtgtctgaggtcatggaaacggaaatcttcctcatttatgcccgtcttatccgtttccgctttgcccttcaccacatcactttttgtcgctgtttggcgagataattcaacggtgtcaggccgtaaaacgccttaaaaacagagataaagtagctcgtgctgctatagccacataattgcgccacctgagtgatatttttgttatccatcaataacatctgtacggcgtaacgcatacgacactctgtgacaatctggctatagctggtattttcgttttttaatttctttttgagcaggctggggcttaaacataggctactggcgacaattcgcagattccagtaatgctgaatatcgctttgaataatgcggcagacgctgtcgcggacgctgctgcgtaagatatacatcagtagggcaataaaccggctttgctcaagaaagttagacaatacggtaaaaagcaatgcgcgcgtcaactccgcttcgcagggtctgctgggttgctgcttgctgtggttggcggctagccggaacacttccggtgtacggctatgacaagcgataaccggggttgccagccggctccagggctttacacaggttaagttcttatttaaaaacaacagataatcgttgatgatgttacggttgatgtgggtgattaatacgtgatttaacgtactgagttcaatgacgttattgttgcacgcgaaggcggccaggtagtttttcggaagggtaaacgtagcatggttattgacgcttacctctacctctttttcggtcaggatcaccacgcaaggttcactgctgctcaattgcatttcgcactcctcagatatcagaaactccgctcaaaggatctatgcttcctgcatgagtgatcggcccgttcgccgataacgatcttctttctttagcacgctttttagcaattaatcttgatggaattctgatgagagcgaaagaggtaagccaggtcgtacccgacttacctggaggagatttaatactcgagaatgccgtgcgcgacgggcaaatagcgcagagagaaatagagagtgtctttaccgcaagaggaacgtttcgctaacaggctggcaatttctgcgtccggtttcggtttcgctgtaaaggttttgcctttgccggcgacaaaaagttcataaacaacgccgctggcaggggcgggactttggcaatcggcgctggcctgtaaataacgttcacgctgttcagcggtcagtttatccacgccgctgccatcctgtacccagacattaacgccggttgctttaacgtgttccagcagttggcgatagccatcggggctcatgtttccggcgaaaaaactactgatataaaccggttttgcactaacatcgctaatcagccgctgcgcgttgtttaaccatgttagcaaaggctgacgggcggcttcgctgcgccagttcaggtcgtcaatttccgcgctgatgtaccagccatccggcgttatgccaggcgcggcgctccataatctggcttgctggagatcggcagccagcaggcgattaagatagctttccagcgctgcggagctctgtttctggtgcataaaaaattccggatcggcgttcagcccgacaataagcttcagaccagcctgttgcgcagctgcggcccgcttaaacaataacgtgcgctgttctggctgggtaaatgcatcgccgtaacgggtccattgcaaaacaagggtatcgaagccttgcaaacgtaactgactcatcagcccctgccactgggtatcggtaacctgactatctcggttttgtggttgccagataatacctttcatcgcaaaggaaaaagggctgaccaaaagcagtgtcagcaatacgaaaatgaacttacgcatttaccagtgcactccaatggtgagaaacgcgttgttgcgctctccgttacgttgattaatcgccttaaaggtatgttgatactcgacgccgagactgactttgtgcggccaggcgtcgtagtgcgtctcgccggtccagatattccagcggaccccgactccgccaagctgcgcgccctgagtgcctttatcacgatagccgttgtcctgaacgtgagcgtaaggctcaatagtctgtccgttagctaccttctgatgccagctgacgcgataatctgccgtccacgcctgaatatcctggcggatatattgcgccgcatcgaggtacaggttttgggcaaaccagccactaccgttcgggtgccattcgtcgctgtatttgccgccattaaagaaactggcgctggcgcgcagcatggtatcggatgcgccattttggccgttcagcggcaactgctgttcgacggcgatgaaaaagatctgatcgcgcagcggcttccagcgcagaccggtgccggacatcggatttttcaccggcatcatcaccccgttttctccggtatcggcaaagacgcggctataaacactgagcaggtcgccttccagcagcatattgcgtccgatgcggtactcggcttccagttgtccgtagctacgatagcttttccctggcgctgcgccgccgacattattgttagcggtactcattgcgccggaacgcaagccgatggaagaatcgaaactgaacgtccagcggcgaccgacctcctcatgcaaacggcggaaattgaagcgttgttgattttgttctggggtcagtggggttatcagcgcctgattatcaatgtcatcaatcaccagccgggcgtagtgctgcgtcgcaggcatgtcatccagacgctggttcacgtaggccagttgtcggatcagtgccggatcgtccggaagccctttatgcgccggttcgagcatttcccggctctgtgcgatatcaccgctatcccacaaggcgtaaccaagcgctgcctgggtgttgctattattcggttccagttccagcgcggcgcgcaaatcactcaccgcggccgggacattatgacgttggcgataaattgtcgcccgcgcaacgtaagcgttggcagaaggcgcaatattgatactgcgcgtgagatcgttcagtgcgagttccggctgaccaggaatgtaacgttgcgcatgcagccaccagtagagggcattgcttcccagtccacgtttttctgcctgttgtagccagcgatcgcgagccgcaccatttcctgccgcctgggcggtattggcagcagcaagcagatcctcattgctcatgtcgtgaagactgattttctgccaggccgccagtgcggtggcgtagtcctcaacctgatacgcctgataggctaccgcacgatgttgccaggcgctcggttgtcgttgttcggcctgaagccatgcatacaacgccacaccgggtagcgtgtcccgataacactttgccagacggttccaggcggcggcatcgtaggaagggctcatatcgcccagcaagcgaactattgccgggcaattatctgcaatacccggcaactgactttgccactgacgttgctccgccagcggtaagggtttgcttaaaatcgccaccttcgccggcgttgccaggtaaggatgactttccagcagagacgccagtcgcgccattaaagtctggctgacacgcgcatcgccctggaaaggatagcgttgcagcaataaatcggcagcttcgcgactctgctcgttctgcatcagttgccaggttagttgatccaggcgggtaagatttgccggttcttgctgatacagcaatcgtgccagacgcagagcttcagccttgttacgggtcgccacgctgacagcataacgctcctcaagcatttcattggcggggagggtggcgagcagtttttgcgctgcgtcgtactgaccttcttttaacagcaccggtagcgtcgcgccaacaacatactggcggttgtcggcaaactgtaccgtataattcgccaacgcctgaacggggttagcgctgtatttagataacagatagagccaacttttctcttgtgcgtccgtggtaaatagtggcttattttcaatgagataatgctggaggcgtgctttttcgccacgataagccagcgcggtcgcgtaagtaatataactctgaggatcggtgaagatcccctgactttgcagtgccaggatccgatcgtccagctgcccggcaagaagcacgtcaaaccactgacggcgttctgccgcgcttaatgtgttctgctggcgtgcttcattgtatagcgtatctgcctgggaccattgtttcaggtagattgcccgttgcagcagatcggttcgcagcgtttttccttccgggcttgcagcaaacgtcgcatcgttcagttgcgctctggcgacaggtaactgtgccagccgcagggcattctgcccgacttcactgcgacaacgcagggtcggcgcagcatcgcacgctttttgctgggcaagcagttcttcaactgtcgtaacgcttttcacttcaaccggaatagccgccagactgcgctcaagtcgggcatctcctgggtgacgtttcagttgatcctcaagcaacagccgcgcccggtcatcatgaccaaaatggcgataggcttccgcaaggtataaagtcagcggaatattatccggcacctgctggtgtatatattcaaattcgcggatggcggttgcttcgtcgttatttttctgtgccttcagcgctttatcgagacggggataaataacaaaatggcgataatcgctcagccccagctcttctgcgctggtgccgatattgtctgcgagtgcgctggtactcaataaagacgtcagcagtaaaccagaccatccgatgacgcgattaaggttattctccttcattttcggactccagttgcgcaacctgttctgtgtttaaacctgctttgagtaatagactttgcatgctaacttgtaattcgcgttgaattgtcaggacgcgatccaacgtttcctggctgataacgccttcggtgaccaaaaacttgccgagcggcagagaactgcgttcatggcgcaataacaacacgttaattgcactacgattaatatgaccgagcgtggtcagtatttcggcgaacaggaactgatgcggcacatattgccgccagatttcaccggcctgctgttccgtgagccactgatgctgaaccgcattgtacaacattgcccgcggatcgtgaccgcgtcggcgtgcataccagtgacgtaaccctgtgacaatttgtccccgcagaacaatgacgtaacgcactttgcgtccgactttacgcgtcagggccgccaggctaaccgggtcaataccatcttcactgccgacaattaactcgtcattttccagacgcagcggcagtaccgcataatgcagcgccacggaggccggcatttcggcaatcaggctggaagggatctgccaggcatcgatggattcccacgccacgccgttttgctctgccagcgcctgtgccagctgctcggcgctaatcagcccctgcatcagcatactaccgcccaggcgtagaccttcgacgcgattacgcagtgctgtatcgagttgttcttcagtgatgacctgattttccagcagaatttgacctaacgggcgcaagctgcgggtatcgccagtcacgctggggaagtcatgcgttgttttatcccacgccacgcgacgtggatcgccgtgttgaagtacctgttttagcgcgcgccagttggccatgaagttaatcaggttgccccagaaaagacgcaggacggaaagcagcccctgcgtcaggccgtagtagccagtaacgaaaatcacccgctgcacgatgcggttaaccatcaaaccaaagtttagccacagcagggtcattaaccatgcgctgccgctgaaaatagaaaggaaatgccaggcatcgggccacaaactttcatacgccagcaacagcaaaagctggatcatcaccagcatcgcgaggaagctgacaaagttactgattgcccctttgcggtcgcgccagagaaagtagttcagcgtcaggctggaggtccatttatgggttttaaagccttggaaaacaatgccgatgatccagcgggatttttgtcgaaccgcagtgctaaaggtatcggggaaatattcgcgcacgcagatcatgttacttgtccgcgcgtgctgtaaaaatttacgctgctcgcgttctttggcttcgtccaccaccggaaaacggacaaaaatttccgtcatacctttttctttcaggcggaagccaatgtcgtaatcttcagtaagactctgcacgtcgaaagcaataccgtcaccgtcagctaacagtgcggtcacggcgcggcggctgaaacaggtgccgacgcctgcgctgggcacttgtccggcgagggcttcacgcaccggaacatctttgccatgcagctcactaaactcatcaatgtaagtcatgctggtgaagtgcgtccattcgcgttcgaacggatacaccgggatctgaatcagatctttacgctcgaccagatagttgaacagacgcaattccatcggactaatcacatcttcggcgtcatgcagaataaaaccagcaaaagcgaaattggcgctacgctcaaattgggtgatggcgtccagcacgttgttcagacagtcggctttgctggtggggccaggacgcgcgcagactaccttatgcacattcgggaagcgagcgcacacttcgtcaacatcacgctgagtatcggggtcgttggggtaggtgccaacaaagatatgatagttttcgtagtcgagcgtggtcgccgccagctcggccatattgccgatgacgcccgtttcattccacgccggaaccataatcgctaacggtttttcatctggtttatacagttcgcggtaactcattcgcgggtagcggcgataaacactcaacttgcgtttaatgcggcgtacccagtagacgacatcaataaaaaaatcgtccagcccgctgatgaacatgatgaccgctaacgttatcgcgattacttttaagccgtagagccaggtagcaaaaacatcaagaagccagtccacacaaaaaccttacattaacgctggttatgtttagggtggcgtatattaaggttttttatgaattgtgacagctttttaccattaataggtatgactattgcggcacgttatttttacactggttataaaagttgccgtttgctgaaggattaagcgggtaatgtgataacaaaccttgtcccccgcgcatcgctcgttaccgcaaccgtgcctttatgcgcgacaacaatgcttttcactatcgccaggccaataccgctaccttcaccttttcgctggcgggaggggtcaacgcgatagaaacggtcaaacaatcgcggtaagtgctcgggcgcaatgggcgtaccggggttttcgacgataacttgcaccaggtgatcgaccgtctgacagcgcactacaattgtctctccggttggcgtataacgcagggcgttgctaagcaggttgcttagcgcccgacgcagcatcagcggatcgcccgcgacctgacacttgtcgccaacaaaccgcaactccacgccgcgatcttccgctaacgcctcgaaaaaatcgaacactttgccgacttcatccgccaggttgagcattttcttttcggggattagctggttgttatcggcctgagcgagaaacagcatatcgctgaccattttcgccattcgcgtcagctcttcgagattagagtagagcacatcttccagctccttctggctgcggctctggctgagggcgatttcggtttgcgttatgagattcgtaattggtgtgcgaatttcgtgagcgatatccgcactgaaattggactggcgggtaaagacatcctcaatacgctcgatcatatggttgaagctcagtaccagctgttccagctcaatgggcacggtctgcgggtcgaggcgaacgtcgagatctttgctggtaatattctggatttgacggctgacgctgcggatcggcgcgtgacctttatgtaccgccaacagtacgataaagacgatcaggatgctgattacgcttgcggtcataataagtttattcatcaaatcatttatgtaatgaagatgaaaatcgatgctaagcgcgatgtagagcgtataaatcggtttgccgtccaccaacgggccaaccggcaagttaatcatccgccagttgctgtgttccatatgcccgtgaccgtggcctggcatcatcatcgtcgggccggaaaggagatacacctcgccaccctgagcgtctttatcgggtatggcgtcacgcgtaaactcgcggatatccggcgcaccgggggagtgatacaccgttttaccctgactatctgccagggaaatcaacacattggaataaccactgacgatatcttccagcgtcattaagcgtcgggcttgcgtttcgtcagggtgatttagtacccgttcaagggtggcgctaatctcttttaaatcattaatatcctgctcggcaaaatgaacttttacactgtggatcatgatccatgcaaaggcgaaaaacgccgcgatggtggccaggctgataaaaaaggtcaggcgggttgccaggctaaacgggcgctgaaatggcttactgaccatccggcacctcaagcatgtaacccacgccgcgcacggtctgaattagcttcggctcaaagtcgttgtcgattttgccgcgcagccgcttcaccgccacatcaatagcattggtatcgctgtcaaaattcatgtcccatacctggctggcgataaggctgcggggcagcacttcgccctgatggcgaaggaagaactccagcagagtaaactctttactggtcaaagtgatgcgcgtgccgctgcgggtgactttgcggctgacgagatcgaccatcaaatcggcaacctgaaactgactttcgataatcaccgccgccccgcgccgcagtaatgtgcgcacccgcgccagcagttcagcaaaagcgaatggcttcaccaggtagtcatctgcccccaactccagccccttgacgcgatgttcaatggtgccaagcgcggtaagcaacagaatcggcatccctttattggcggagcgtaacatgcgcacgatatcccagccgttcacgtccggcagcataatatcgaggattatcagatcataatcaccggtcatcgccagatggtagccattcagcccgttgtcggccaaatcgaccacaaaaccggcttcggttaaccctttggtcaagtattctccggttttcttttcatcttcgacaatcaacagtttcatatttcctccgcatgttgcccgggcaattctagagtagcgggatcagatggcaatcgcttattggcaaaatgacaattttgtcatttttctgtcaccggaaaatcagagcctggcgagtaaagttggcggcataaaatcaccagaaattatgagcctatgtctccttgtaaacttctgccattttgtgtggcccttgcgctaaccggttgtagtctggcaccggattatcagcgtccggcaatgcccgtgccgcagcagttcagtctcagccagaacggcctggttaacgcagcagataactatcagaacgcgggctggcgcaccttttttgttgataatcaggtgaagacgctgattagcgaggcgctggtgaataatcgggatttgcgcatggcgacgctgaaagtgcaggaggcacgggcgcaatatcgtctgaccgatgccgaccgctacccacagctcaatggcgagggcagcggcagctggagcggtaatcttaaagggaataccgccacgacacgggagtttagcaccggccttaacgccagctttgacctcgattttttcggtcgcttaaagaacatgagcgaagccgagcgacaaaattatttagccactgaggaagctcagcgcgcggtgcatattctgctggtttctaatgtcgcgcaaagctatttcaatcagcaactggcgtatgcgcaattgcaaatagccgaagaaacgctgcgtaattatcagcagagttatgcgtttgtcgaaaaacaactgttgacaggtagcagtaatgttctggcgctggaacaggctcgcggggtgatagaaagtacccgcagcgacatcgctaaacgtcagggggaactggcgcaggcgaataatgcattgcaactgttgctgggaagctacggcaagctgccgcaagcgcagacagtaaacagcgacagcctgcaaagcgttaaattaccggcgggattgagcagccaaatcttattgcagcgcccggatattatggaagctgaacacgcgttaatggcggctaatgccaatattggcgctgcacgcgcggcattttttccgtctataagcctgaccagcggaataagcaccgccagtagcgatctaagcagtttatttaacgccagcagcgggatgtggaattttatacccaaaattgagatccccatttttaatgccggacgcaaccaggccaatctggatatcgccgaaattcgccagcagcagagcgtggtgaattatgaacagaaaatccagaacgcctttaaagaagtggcagatgcgctggcattacgtcaaagcctgaacgatcaaattagcgcccagcagcgttatctggcaagcctgcaaattactttgcaacgggcgcgggcattatatcagcacggcgcagtaagttatctggaagtgctggatgccgagcgttctttatttgcaacccgacaaactttacttgatctgaattatgcccgtcaggttaacgaaatttctttgtataccgcacttggtggcggttgacagcaatatactcgtcatacttcaagttgcatgtgctgcgtctgcgttcgctcaccccagtcacttacttatgtaagctcctggggattcactcgcttgtcgccttcctgcaactcgaattatttagagtatgacttttaactccaggagagaataaatgaaaaaagcactgcaagtcgcaatgttcagtctgtttaccgttattggctttaatgcccaggctaacgaacatcatcatgaaaccatgagcgaagcacaaccacaggttattagcgccactggcgtggtaaagggtatcgatctggaaagcaaaaaaatcaccatccatcacgatccgattgctgccgtgaactggccggagatgaccatgcgctttaccatcaccccgcagacgaaaatgagtgaaattaaaaccggcgacaaagtggcgtttaattttgtccagcagggcaacctttctttattacaggatattaaagtcagccagtaacccaggtttaatgagatgaaaaaaatcgcgcttattatcggcagcatgatcgcgggcggtattatttctgcggcaggttttacctgggttgcaaaggcggaaccgcctgcagaaaaaacgagcaccgcagaacgtaaaatcttattctggtacgacccaatgtatcccaatacgcggttcgataaaccaggtaaaagcccgtttatggatatggatctggtgccgaaatatgccgatgaagagagttctgcgtctggtgtgcgcattgacccgactcagacgcagaatctgggggtgaaaacggctaccgtcacgcgcggaccgctgacttttgcccagagtttcccggcgaatgtcagttacaacgagtatcagtatgccattgtgcaggctcgcgctgccgggtttatcgacaaggtgtatccgcttaccgtgggcgataaagtacaaaagggcacaccgcttctcgacctgaccattcctgactgggtggaagcgcagagtgagtatttactgctgcgcgaaaccggcggtacggcgacccagactgaaggcattcttgagcggctgcgactggcgggaatgccggaggcggatattcgccgcctgatcgccacgcaaaaaatccagactcgctttacgctcaaagcgcccattgatggcgtgatcaccgcgtttgatctgcgcgcgggaatgaatatcgccaaagataacgtggtagcgaaaattcagggtatggacccggtgtgggtcactgctgcgatcccggagtctatcgcctggctggtgaaagatgccagccagtttaccctcaccgttccggcgcgaccggataaaacactcaccatccgcaaatggacgctgctacctggcgtggatgccgcgacccgcacgctgcagctgcgtctggaagtcgacaacgccgacgaggcgctaaaaccgggcatgaacgcctggttgcaactcaacaccgccagcgaaccgatgctgctcattccgagtcaagcgctgattgataccggcagcgaacagcgggtgattaccgttgatgccgacgggcgctttgtaccgaaacgcgttgctgttttccaggcaagccaaggcgtcaccgcattacgctctggtctggcggaaggtgaaaaggtggtttccagcggcctgttcctgattgattccgaagccaatatttctggcgcactggagcggatgcgctctgaaagtgcgacccatgcgcattgagggaataaccaatgattgaatggattattcgtcgcagcgtggcgaaccgttttttggtgctgatgggcgcgttgtttctgagcatctggggcacctggaccatcattaatacgccagtggatgcgctgccggatctctccgatgtgcaggttattattaaaaccagctatcccggtcaggcaccacaaatcgttgaaaatcaggtgacttatccgctaaccaccaccatgttgagcgtgcctggcgcgaagactgtgcgcggtttcagtcagtttggcgactcttatgtgtatgtcattttcgaagatggcaccgatccgtactgggcgcgtagccgggtgctggagtacctcaaccaggtacagggtaagctgcctgcgggagtcagcgccgagctggggccagatgccacgggtgttggctggatctatgaatatgcactggtggatcgcagcggtaagcacgatctggccgatttacgcagtttacaggactggtttctcaaatatgagctgaaaaccatccctgacgttgcggaagtggcgagcgtgggcggtgtggtgaaagagtatcaggtggttatcgatccccagcgcctggcgcagtatggcatcagtctcgccgaagtaaaaagcgcgctggatgctagtaaccaggaagcgggcggtagcagcatcgaactggcggaagcggaatatatggtgcgcgccagcggctatctgcaaacgctcgacgactttaatcacatcgttttaaaagccagtgaaaatggcgtgcccgtttatctgcgcgatgttgcgaaggtccagattggcccggagatgcgccggggcattgccgaactaaacggcgaaggcgaagtggcgggcggggtggtgatcctgcgatccggcaaaaacgcccgagaagtgatcgccgccgtgaaggacaaactggaaacgctgaaaagtagtctgccggaaggcgtggagatagttacaacatacgatcgcagccagctcattgaccgcgccatcgacaacctcagcggcaagttgctggaagagtttattgtggtggcggtagtctgtgcgctgtttctctggcatgtgcgcagcgcgctggtggcgattattagcttgccgctggggttgtgtattgcttttattgtcatgcacttccagggactgaatgccaatattatgagcttgggtggcattgcgattgccgtcggggcgatggtcgatgctgctatcgtcatgatcgagaatgcgcataaacggctggaagagtggcagcaccagcatcctgacgccacgctggataataaaacgcgctggcaggtgatcaccgatgcgtctgttgaagtggggccggcgctatttatcagtctgctgattatcacgttgagctttatcccgatcttcaccctggaagggcaggaagggcgtctgtttggcccgttggcgttcaccaaaacgtatgcgatggcgggtgcggcgctgctggcgatcgtagtgatcccgatcctgatgggctactggatccgtggcaaaattccgccggaaagcagtaacccgctcaatcgctttttgattcgtgtttatcatccgctgttgctgaaagtactgcactggccgaaaaccacgctgctggtggcggcgcttagcgtgctgacggttctctggccgctcaataaagttggcggggaatttttaccgcagatcaatgaaggcgacttgttgtatatgccaagcacgctgccggggatttccgcagcagaggcggcgagtatgctgcaaaaaaccgacaagctaattatgagcgtacctgaagtggcgcgggtatttggcaaaaccgggaaagcggaaaccgccaccgattctgctccgctggagatggtagaaacgaccatccagcttaagccgcaggagcagtggcggccaggcatgacgatggacaaaatcattgaggaactggataacaccgtgcggctgccggggctggcgaatctgtgggtgccgccaattcgtaaccgtatcgatatgctcagtaccggcattaaaagccccatcggcattaaagtttccggcactgtgctggcggatatcgacgcgatggctgagcaaattgaagaagtagcgcgaacggtgccaggcgtagcttctgcgcttgccgagcggctggaaggtgggcgctatatcaacgttgagattaaccgtgaaaaagccgcacgttacggtatgacggtggcggatgtgcagttgtttgtgacttctgcggtgggcggggcgatggttggcgaaacggtggaagggattgcccgttatccaattaatctgcgttatccgcaaagctggcgcgatagtccgcaggcactgcgccagctgccgatcctgacgccgatgaagcagcaaatcaccctggcagacgtggccgacattaaagtctctaccggaccgagcatgctgaaaaccgagaatgcgcgcccgacgagctggatttatatcgatgcccgcgatcgtgacatggtgagcgtggttcacgatttgcaaaaagcgatagctgaaaaagtgcagttaaaaccgggcaccagcgtggcattctccgggcagttcgagctactggagcgcgccaaccataagcttaaactcatggtgccgatgacgttgatgattatcttcgtgctgttgtatctggcgttccgtcgggtgggcgaagcgttgctgattatcagcagcgtaccgtttgcgctggtgggcggcatctggttgctgtggtggatgggctttcatctttccgtggcgacgggcactggctttatcgccctcgccggggtcgccgccgaatttggcgtggtgatgctgatgtatttacgtcacgccatagaggccgtgccgagcttgaataatccacaaacattcagcgagcagaagctggatgaggcgttatatcacggcgcggtcctgcgcgtgcgcccgaaagcgatgacggtggcggtgattatcgccggtctgctgccgattctgtggggaacgggggctggtagtgaggtgatgagccggattgccgcgccgatgattggcggcatgatcaccgcacctttgctgagcctgtttattatcccggcggcgtataagctgatgtggctgcaccgacatcgggtacggaaataaaagcaggataccccgtttaaccgtgtggattgtgtcttgcgacgatgggcactaaatgttaaaaggtgcccctcaacaaaaaagacacacaggggaaaggcgtgaaaaacgcgagtaccgtaagcgaagatactgcgagcaatcaagagccgacgcttcatcgcggattacataaccgtcatattcaactgattgcgttgggtggcgcaattggtactggtctgtttcttggcattggcccggcgattcagatggcgggtccggctgtattgctgggctacggcgtcgccgggatcatcgctttcctgattatgcgccagcttggcgaaatggtggttgaggagccggtatccggtagttttgcccactttgcctataaatactggggaccgtttgcgggcttcctctctggctggaactactgggtaatgttcgtgctggtgggaatggcagagctgaccgctgcgggcatctatatgcagtactggttcccggatgttccaacgtggatttgggctgccgccttctttattatcatcaacgccgttaacctggtgaacgtgcgcttatatggcgaaaccgagttctggtttgcgttgattaaagtgctggcaatcatcggtatgatcggctttggcctgtggctgctgttttctggtcacggcggcgagaaagccagtatcgacaacctctggcgctacggtggtttcttcgccaccggctggaatgggctgattttgagcctggcggtaattatgttctccttcggcggtctggagctgattgggattactgccgctgaagcgcgcgatccggaaaaaagcattccaaaagcggtaaatcaggtggtgtatcgcatcctgctgttttacatcggtagtctggtggttttactggcgctctatccgtgggtggaagtgaaatccaacagtagcccgtttgtgatgattttccataatctcgacagcaacgtggtagcttctgcgctgaacttcgtcattctggtagcaagcctgagtgtgtataacagcggggtttactctaacagccgcatgctgtttggcctttctgtgcagggtaatgcgccgaagtttttgactcgcgtcagccgtcgcggtgtgccgattaacagcctgatgctttccggagcgatcactagcctggtggtgttaatcaactatctgctgccgcaaaaagcgtttggtctgctgatggcgctggtggtagcaacgctgctgttgaactggattatgatctgtctggcgcatctgcgttttcgtgcagcgatgcgacgtcaggggcgtgaaacacagtttaaggcgctgctctatccgttcggcaactatctctgcattgccttcctcggcatgattttgctgctgatgtgcacgatggatgatatgcgcttgagtgcgatcctgctgccggtgtggattgtattcctgtttatggcatttaaaacgctgcgtcggaaataaggcattcacgctacatccgacaaaacgatgtcaaccatccgaaaccgctctcatccattcgatgagagcggtttttttaattactgcttaaatgcacccgccagagagcgaatatcattgccggttggcgagtaatccccgcatatccggttgtcaggtcaggatggtaaggcacctgctttacactttcgcccgtggtcagtgatggctgcgggcgaatcgtaccagatgttgtcaattaatcgtgttggcacagcgttatgactatcttttcttttatctgccagtgcacagcaaacatctcattctcacgatgaatgatgacctgctgtttattccagctaattatctgatagtccagaaaacctgcatcagtttggatctcacttgccttaaatgcgctctctttggcggaaaatgccagtgtcagcgccagagaaaaggctaaaccgcagtctgcgagtcgctcgtgttccgctggtgtaataatgttgtctgtcaattctcttgcggtttgtacagaaaaaatttcttctatatcaatgccaatcggttgacgagataccacggctaatgccgtagtcccacagtggctaatactgccgtatacctccgcaggccagacaggttggcgtagctcgccgattgcgggcacacatttatagccatattcccgcaaagcataaacagcagcgatccgtccggctaaatgctctgttttacgtttacgtccagcgtgttgcagttgtgcgtagtgcggcagccagagtaaatcctgctcacaaaaattcgccggatcgaactcaacaaaatgcagcgtatgtccggcaaaggggagggaggtatgcgtagttttcatatcgaccatattcgagactgatgacaaacgcaaaactgcctgatgcgctacgcttatcaggcctacatggtcctgcaatatattgaattggcaagatttttgtaggccggataaggcgttcacgccgcatccggcatgaacgacgcgcactttgtcaacaatctgacgttagcatcagaagtgggtgtttacgctcatataccacgtacgtcccggctcgttataggtatacgccccggcaccggcgatatagttggcccctgccgaatcgcccgtggtctgggcattacccgcacgccacaaacgtttgtcgaacagattgtccacgccgccggtcagactgacattcttcgtcacatcccaggtcgcgctcaggccaacaatgctgtaaggactaatttctttggtttccggtccaaccgctggctgacctttatagttgtacttcttcggctgctgcttgccgtaccaggtgaaggtcgtttgcatgctcaaatcttcccgtgcctgccagctcagcgtactgttcaacgtatactccgggatgatgctcaaacggtcgcccgtggttttgttttcactcttcagcatataagtgatgttattggtccacatcaccgtttcgctaaccggtacgtttaagcttccttccagaccttcaaccaccgctttcggcacgttatcccactgatagagatcggtgccgactgcgttttgccctacagccacatagcccgcttcaatcttattgcgataatcgttacggaaccaggtgacgcccgccagccacccgtcgcgtttgaactccagaccaatctctttgttgatgctggtttctgctttcaggtcatcgttaccttgcagatagcagccgcccgcgctggcatagcaaccctgacctttactgtagagaatgtagttcgggttagtctggtacaggctcggcgctttataagcacgggcgatgcccattttcagcgtgaagtcatcgcctaaaccttggcttatgttcagcgccgggctccagttattgccgacaatactgtgatgatcgaaacgcagccccggcgttacgatggtgctgtcagtcagctccatgttgttttcggcaaacaggctgaaaatttctgctttactatacgggctacggtcggtggtactcacgccatcaatagcgccaccggtattcgttccggtcagtgcctgggtgttggaacttaagtccttcatccgttgctgattccactccgtacccagcgtcagcgtctggttaacgaggaaatcaatcggcaggttaacttcgctgtgcagcatcacgtcatcaagatcgatatcgacgaaatcctgtgtcgctttttcgttaaatttcccttcggtaccgcccgccagaccttccggaatacggctgttacgggtgtgttcgtactgcacccagttgctggtggtcacgccgttatcccagccaccgttccaggtcagcgcgtagttctggcgatacagacggttggtttcatcgccatatttgctgcgggtataggaatcggagttggtattctgggtgtcgcccgcatacaggttaccctggcggctgtaacctgcttccagttccaggctttgcaatggcgcgaaatcccagcgcaccacgccattaatatctttgttgattaccccttcgcgcccggctggtaacgtcgtggcatacgttccggcacgcgcggactgatggccctggttgatatcccacgcgtcagcctgggttttgtcgaggttgccatacaaacggaagctgaattcgtcgcccagcggaccggtcaggctaaagttagtgcgtttggtggcaccttcctctttatgttctggcgcattgaaatatgcgtcccaggagccgtgccactcgccgctgccttttttggtaatgatgttaaccacgccgcccgccgcgccgttgccataacgcgcagctgccggaccacgcagaacttcaatacgttcaatcatttcaggtggcacccaggaagtatcaccacgggtatcgcgctcgccacgccagccctgacgcacgctgttacggctgcttaccggcttgccgtcaatcaaaatcagcgtgttttccggacccataccgcgaatatcaatctgtcggttattcccacgctgaccactggtggagttaccggtcaggttaacgcctggcatggtacggatgatcttgctcacatcgcgggcaaccgggtttttgcggatttcatctgcggtgatggtgctaacgccaggcgcctgtaagttctgctcggcggcggtaacgacaatagtatcgtcatgactaacaggagtatcggtcggctcttgtgcctgcgctaccccataaatccccagattgaccaacaaggccagggaatgaatcttcttgttcattgttttattcctgcatttttgccacgaattgcaactgtcgggcatggtcgtcatcaacacgacgcatcccgctaccgcgaaaacctttgatcctgaaagacacgcagtgcagttggttaattaatgtccgcgcttcccacggcgcgccattacgctattgcaaatgcaaatagttatcaataatattatcaatatatttctgcaatcaatgaaaaattgcacagtaaacatggggttatggtgtgacggcgttaaaagtaggaagtgagagctggtggcagtcgaaacatggcccggaatggcagcgtctgaatgacgaaatgtttgaggtcactttctggtggcgtgatccccaaggttctgaagaatacagcacgataaagcgcgtatgggtctacatcactggtgtgaccgatcaccatcagaacagccagccccagagcatgcagcgaattgcaggcactaacgtctggcagtggacgacacaactcaatgccaactggcgcggcagctactgctttattcccaccgaacgcgatgacattttttctgtaccatcccccgatcgcctcgaattgcgcgaaggctggcgaaaactattaccccaggcgatagccgatccgctgaacctacaaagctggaaaggcgggcgagggcacgctgtttctgcactcgaaatgccgcaagcgcctctgcaaccgggatgggattgtccgcaagcgccagaaatacctgccaaagaaattatctggaaaagtgaacggttgaaaaagagtcggcgtgtatggatttttaccaccggcgatgcaacagcagaagaacgcccgctggcagttttgctcgatggcgaattttgggcgcaaagtatgcccgtctggccagtgctgactagcctgacccatcgtcagcaacttcctcccgccgtgtatgtgttgatcgacgctatcgacaccacgcaccgcgcccacgaactgccgtgtaatgcggatttctggctcgcagtacagcaagagttattacccctggtgaaagctattgccccttttagcgatcgtgccgatcgcaccgtggttgccgggcagagttttggtgggctttccgcgctgtatgccggactgcactggcctgaacgctttggctgtgtattaagccagagtggaagctactggtggccgcatcggggcgggcagcaagagggcgtgttacttgaaaagctaaaagctggtgaagttagcgccgaaggtctgcgcattgtgctggaagcgggtattcgcgagccgatgatcatgcgggccaatcaggcgctgtatgcgcaattacaccccataaaagaatccattttctggcgtcaggttgacggcggacatgatgcgctttgttggcgcggtggcttgatgcaggggctaatcgacctctggcaaccacttttccatgacaggagttgaatatggcattcagtaatcccttcgatgatccgcagggagcgttttacatattgcgcaatgcgcaggggcaattcagtctgtggccgcaacaatgcgtcttaccggcaggctgggacattgtgtgtcagccgcagagtcaggcgtcctgccagcagtggctggaagcccactggcgtactctgacaccgacgaattttacccagttgcaggaggcacaatgagccagcatttacctttggtcgccgcacagcccggcatctggatggcagaaaaactgagtgaattaccctccgcctggagcgtggcgcattacgttgagttaaccggagaggttgatagcccattactggcccgcgcggtggttgccggactagcgcaagcagatacgctgcggatgcgttttacggaagataacggcgaagtctggcagtgggtcgatgatgcgctgacgttcgaactgccagaaattatcgacctacgaaccaacattgatccgcacggtactgcgcaggcattaatgcaggcggatttgcaacaagatctgcgcgtcgatagcggtaaaccactggtctttcatcagctgatacaggtggcggataaccgctggtactggtatcagcgttatcaccatttgctggtcgatggctttagtttcccggccattacccgccagatcgccaatatttactgcacatggctgcgtggcgaaccaacgcctgctagcccatttacgcctttcgctgatgtagtggaagagtaccagcaataccgcgaaagcgaagcctggcagcgtgatgcggcattctgggcagaacagcgtcgtcaactgccgccgcccgcgagtctttctccggcacctttaccggggcgcagcgccagcgcagatattctgcgcctgaaactggaatttaccgacggggaattccgccagctggctacgcaacttagtggtgtgcagcgtaccgatttagcccttgcgctggcagccttgtggctggggcgattgtgcaatcgtatggactacgccgccggatttatctttatgcgtcgactgggcagcgcggcgctgacggctaccggacccgtgctcaacgttttgccgttgggtattcacattgcggcgcaagaaacgctgccggaactggcaacccgactggcagcacaactgaaaaaaatgcgtcgtcatcaacgttacgatgccgaacaaattgtccgtgacagcgggcgagcggcaggtgatgaaccgctgtttggtccggtactcaatatcaaggtatttgattaccaactggatattcctgatgttcaggcgcaaacccataccctggcaaccggtccggttaatgaccttgaactggccctgttcccggatgtacacggtgatttgagtattgagatcctcgccaataaacagcgttacgatgagccaacgttaatccagcatgctgaacgcctgaaaatgctgattgcccagttcgccgcggatccggcgctgttgtgcggcgatgtcgatattatgctgccaggtgagtatgcgcagctggcgcagctcaacgccactcaggttgagattccagaaaccacgcttagcgcgctggtggcagaacaagcggcaaaaacaccggatgctccggcgctggcagatgcgcgttacctgttcagctatcgggaaatgcgcgagcaggtggtggcgctggcgaatctgctgcgtgagcgcggcgttaaaccaggggacagcgtggcggtggcactaccgcgcagcgtctttttgaccctggcactccatgcgatagttgaagctggagcggcctggctaccgctggataccggctatccggacgatcgcctgaaaatgatgctggaagatgcgcgtccgagcctgttaattaccaccgacgatcaactgccgcgctttagcgatgttcccaatttaacaagcctttgctataacgccccgcttacaccgcagggcagtgcgccgctgcaacttagtcaaccgcatcacacggcttatatcatctttacctctggctccaccggcaggccgaaaggggtaatggtcgggcagacggctatcgtcaaccgcctgctttggatgcaaaatcattatccgcttacaggcgaagatgtcgttgcccaaaaaacgccgtgcagttttgatgtcagcgtgtgggagtttttctggccgtttatcgcaggggcaaaactggtgatggctgaaccggaagcgcaccgcgacccgctcgctatgcagcaattctttgccgaatatggcgtaacgaccacgcactttgtgccgagcatgctggcggcatttgttgccagcctgacgccgcaaaccgctcgccagagttgcgcgacgttgaaacaggttttctgtagtggtgaggccttaccggctgatttatgccgcgaatggcaacagttaactggcgcgccgttgcataatctatatggcccgacggaagcggcggtagatgtcagctggtatccggcttttggcgaggaactggcacaggtgcgcggcagcagtgtgccgattggttatccggtatggaatacgggtctgcgtattcttgatgcgatgatgcatccggtgccgccgggtgtggcgggtgatctctatctcactggcattcaactggcgcagggctatctcggacgccccgatctgaccgccagccgctttattgccgatccttttgccccaggtgaacggatgtaccgtaccggagacgttgcccgctggctggataacggcgcggtggagtacctcgggcgcagtgatgatcagctaaaaattcgcgggcagcgtatcgaactgggcgaaatcgatcgcgtgatgcaggcgctgccggatgtcgaacaagccgttacccacgcctgtgtgattaaccaggcggctgccaccggtggtgatgcgcgtcaattggtgggctatctggtgagccaaagcggcctgccgttggataccagcgcattgcaggcgcagcttcgtgaaacattgccaccacatatggtaccggtggttctgctgcaacttccacagttaccacttagcgccaacggcaagctggatcgcaaagccttaccgttgcctgaactgaaggcacaagcgccagggcgtgcgccgaaagcgggcagtgaaacgattatcgccgcggcattcagcagcttgctggggtgtgacgtgcaggatgccgatgctgatttcttcgcgcttggcggtcatagcctactggcaatgaaactggcagcgcagttaagtcggcaggttgcccgccaggtgacgccggggcaagtgatggtcgcgagtactgtcgccaaactggcaacgattattgatgctgaagaagacagcacccggcgtatgggattcgaaaccattctgccgttgcgtgaaggtaatggcccgacgctgttttgtttccatcctgcgtccggttttgcctggcagttcagcgtgctcagccgttatctcgatccacaatggagcattatcggcattcagagtccgcgccccaatggccccatgcagacggcggcaaacctggatgaagtctgcgaagcgcatctggcaacgttacttgaacaacaaccgcatggcccttattacctgctggggtattcccttggcggtacgctggcgcagggtattgcggcgcgactgcgtgcccgtggcgaacaggtggcatttcttggcttgctggatacctggccgccagaaacgcaaaactggcaggaaaaagaagctaatggtctggacccggaagtgctggcggagattaaccgcgaacgcgaggccttcctggcagcacagcagggaagtactagtacggagttgtttaccaccattgaaggcaactacgctgatgctgtgcgcctgctgacgactgctcatagcgtaccgtttgacggtaaagcgacgctgtttgttgctgaacgcacacttcaggaaggtatgagtcccgaacgcgcctggagcccgtggatagcggagctggatatctatcgtcaggattgtgcgcatgtggatattatctctccagggacgtttgaaaaaattgggccgattattcgcgcaacgctaaacaggtaaattaatattatttataaacccataattacagaaaataattatgggttttttatttgtttgatttataggtttgatgaatatttctcttaaatagagtgaatgttgcattcagtggaaggaatttacaaacttcagcttcggataattatcaccaactggtaaagtgagcgccgtggagatttccccctattggactcattttcaggttataccccatgagtagtctgaatattaaacagggaagtgacgctcattttcccgattatcctctggcgagccccagtaataatgaaattgatttacttaatctaatcagtgttttatggcgggccaaaaaaacggtcatggcggtcgtttttgcgtttgcctgcgcaggcttgctgatctctttcatcctgccgcaaaaatggaccagcgcggcggttgtcacgcctccagaacctgttcagtggcaagagttggagaaaagtttcactaagcttcgtgtgctggatctggatatcaaaattgatcgtacagaagcatttaacctgtttatcaagaagtttcagagcgttagcttgctggaagagtacctgcgtagtagtccttatgtgatggaccaattaaaagaggcgaaaatcgacgaactggatttgcatcgcgcaattgtcgcattgagcgaaaaaatgaaagcggttgatgacaatgccagtaagaaaaaagatgaaccgagtctgtatacctcctggacgctaagttttaccgcgccaaccagtgaagaggcgcagaccgttttgagcgggtatatcgattatatctctacgttggtggtgaaagagagcctagaaaacgtccgtaataaactggagatcaaaacccagtttgaaaaagaaaaactggctcaggatcgcattaaaacgaaaaatcaacttgatgcaaacattcagcgcctcaattatagtctcgacattgccaacgcggcaggaattaaaaagcccgtttacagtaatggtcaggccgttaaagatgaccccgatttttctatttctctcggtgcagacggtattgaacgcaaactggaaatagaaaaagcggtcactgacgttgcggaactgaacggtgaattacgtaatcggcagtatcttgtcgagcaattaacaaaagcacatgtcaacgatgtgaattttacgccgtttaaatatcagttaagcccgagtttgccagtgaaaaaagacggtccgggtaaggcgattattgtgatcctttccgcgttgatcggcgggatggtggcttgtggtggcgtgctgttgcgctatgcgatggcatccagaaaacaggatgccatgatggcagaccacttagtttaactatttgcggtactaggtgccgttcgtccgagcggcaccacaagcggcgttccggcaactggatcgtcaatgatcatgcagcgcagaccataaatgcgctcaatcagttcagcagtgacaatctccttcggcgctccctgagcaacaattttcccttcccgcaatgcaatcaaatggctggcgtaacgacaggcctgattaagatcgtgcagcaccgccgccagggtatagcctttttcgcggttcagttcgcttaacaactccagcaaatcaatctgatgactgatatccagccaggtcgtgggttcgtcgagcagcataattgccgtttcctgggccagcaccatcgcgatccacgctcgctggcgttgtccgccagaaagggtatccacgctttgatctgccagatgagttattcccgtggcctgcattgctttcgttaccgcttcttcatcctctttgcgccagcgggtaaacagcggttgatgcggataacgtccacgcgccaccagctcctgcacggtgatatcgcccggcgtggtagcattttgcgccaacagaccaatccggcgtgcaacctctttactggcgtaatgttgaatgtgctcgccatccagccagacatgcccatgagcaggcgtcatcaggcggcttaaggtacgcagtaacgtggatttaccgcagccatttggcccgataattgccgtgaagtgaccatcaggtatttctacagtcagattttccgcaacggtatatttgccatatcccagggttaactgttcgccgcgcaaacgggctacactttcggtcattttttgcgagactcctgaattaacaagacgataaggtaaataccgccgaggctgacggtaacgacgccaaccggaagttgatacggcataaacagttgttgggcgcagagatcggccgccagcagtaacagcgccccgcatagcgccgcctgggttagcccccagcgagcggtgccgctaatgcgtcgggcaatgtgcggtgcgactaaagcaataaaggaaatcggcccggcaagcgctgttgccgcagcggtaagcaccactgcaaccagcatcattaacagacggctacgttcgacgctgacgcccagcgcacacgcggtatcatcgcccatttccagcaagcgcatccggcgtaccagtaaggcggcggcaatgagcatcaatataatgatgggtgcggaagggctggtttttgcccacgtcaggccgttgaggcttccggcattccacaaacctgctgttagcgccgtttctaaagacgctttcagcaacagccaggtattaaaggccaccagcatggcgcgaacgccgataccgataataatcaaccgaaaggtgtcgatgccgttgcgccaggcgagcagccagaccagcaggctagtgacaatgccgcccaccattgcactcagcgcgatagccgtcaggtcctgaccaaacagcaccatcgccaccagcacgccgctccacgccccggtgttaaagcccattacgtcagggctgccgagcgggttacgcatcaggctctgaaaaatcgcgccactgacgcccagtgctgcgccaatcaacagcgccatcagcacgcgtggtaaacgccattcggtgaccaccatcgtcatactgcgcggcgcatcgcccatcagcgcggcgaatacctggctggtttccagcgtgacggcaccgctgcgtaatccccagatacctgcaaccacacaggcggaaaccagcagcaaacaggtgatgagtaatcggcgagagacgtaaatcatgcaccacctcgcgttttacgtcgcacgaggaagatcagcaccggtgcaccaataaacgcactgaccacagaaacgcgcagttcgccgggcacaatcacccgcccgatgatatcggcaaacagcagcagggcaggggtagcaagtagcgtgacgggcaggctccagcgatgatcggcacccaccagccaacgcgccatatgcggcatcatcaggccaataaaggcaatcgggccaactattgccgtcgcactaccacaaagcacggtaatcgccagcagaccaatcaactgtgtgcgcgccacgcgactgcccagcgccgtcgcggtgtcgctgccgaggctcaaactgttcagcgcgcgactcagtaatagcgcagttgctccggcgatcagcaccgggatcagcaccacttttaaggtatgtagattgcgaatatccaggctaccggcttgccagaaacgcaactgatcgtagacgtcaggattaagcagggcgatgccgctggtcagtccttccagcaccgccgccagcgccacgcccgccagggttaaacgcaccggacttaactgcccgccgccctgactgccggtaaaggcaacaatcaaactggccaccagcgccccggcgaaggccatcgccagttgttcctgcgcggaagagtaaccaaacagcgccgcacccagcacaatggcaaagctggctccggcgttcacgccaagcaagccggggtcggcaagtgggtttcgggtgagggtttgcattaacgccccggcaaggccaagcgcgccgcctgccagtaaaccggcaagggtacgcggcagccgcgcgtcgagcacgatggtgcagtcggcgctctggcaggtgccggagaaggcctccagcactacggaagcggggagactttttgccccaatgagcaggcttaatgccgtcgcgataatcagtaataacagcaatccgggcacggcaatggcgcgtgtcacggcaacagaaccagacatacgaacttccatgataatgaaattaattatcgttatcgatcttatttggatatgttagcatgtgcagcctaagaataggtatttaaaatatttgatggcaaggcattgtaatgaataaacaatcctggctgcttaacctcagcctgttgaaaacgcacccggcgtttcgcgcagtattcctcgctcgtttcatcagtattgtgtctctgggtttgctcggcgtcgcggtgccggtgcagatccagatgatgacacattccacctggcaggtggggcttagcgtgacgctgaccggcggcgcgatgtttgttggcctgatggtcggcggtgtgctggcggatcgctatgagcgcaaaaaagtgattttgctggcgcgcggcacctgtggcattggcttcattggactgtgccttaatgcactgctgccggagccgagtttgctggcaatctatttacttggtttatgggatggttttttcgcaagccttggcgttacggcgctattggcggcgacaccagcactggtagggcgtgaaaacttaatgcaggccggggcgatcaccatgttgaccgtgcgtctggggagcgtgattagccccatgattggcggtttattgctggcgaccggtggcgtagcctggaactacgggctggcggcggcgggcacgtttattaccttgctaccgttgttaagccttccggcgttgccaccgccaccgcagccgcgtgagcatccgttgaaaagtttactggcaggatttcgttttctgcttgccagcccgctggtgggcgggattgcgctgctgggtggtttattgacgatggcgagcgcggtgcgggtactgtatccggcgctggctgacaactggcagatgagtgcggcacagattggttttctctacgcggcgatcccgctcggcgcggctattggtgcgttaaccagcgggaagctggcacatagtgcgcgaccagggttattgatgctgctctccacgctgggaagcttcctcgccattggtctgtttggcctgatgccgatgtggattttaggcgtggtttgtctggcgctgttcggctggttgagtgcggtcagcagcttgctgcaatacacaatgctgcaaacgcaaaccccggaagcgatgttagggcggattaacggtttgtggacggcgcagaacgtgacgggcgatgccataggcgcggcgctgctgggtggtttgggcgcgatgatgacaccggttgcttccgcaagcgcgagcggttttggtttgttgattatcggcgtgttgttattgctggtgctggtggagttgcgacattttcgccagacgccgccgcaggtgacagcgtccgacagttaatgcttaaaacagcgccttaagcctatccagcacttgcatggcgctgtagtaatccagacggaacgtctcggttcccagcgcataaacctgcttgttttgtactgcaggcaggtgcgcgagcagcggattagcataaatagcatcggcatctttctgatcaccggcgaacaggaatagactctcgccatttaaccctgcagccagattttccccaccaagctgaatgatgtcatggcgtttaccctgactttggctggcatttaaccctgcgggtaacttcgccagcgtaaagccgagttgttccagcatctgcccttgtgcactttctggcgtccagagattggcactgtgtgcagcggcagtatagacaatggcagtgaccggctgcggcggtaatttgatttgctctttcgccgccgccagttgcttatcaaactgcgcaatccgctctgccgcttgtttctcatgcccggtaatttcgccaagttgcgttaacaggctctgccagcttttgtcgtcgtaattgatgattaatgtcggggcgatggtggaaagctgatcatacagtgccagcgcgctatccccgccggttgcgctaattaaaatcagatccggcatttgcgcggcaacggcttcggcgctcggttcgccgatatagagccgttgcagtttgcgttctttcgccaccttgctccactggcgtaaaaagccctggtcatccgcgacgcggttattcggcgtggtcgcgccgctggcgatcaccggagcatcaatcgccagcagactgccggtcagggtgacgctggtggaaacaatacgctgcggctggctttccagtgtatgtgtgccacggctgtcagtaatctgacgcggccagtcagcggcctgaactgcggctattccactaagcaaaagtcctgttaatagaagggcgttgcggtagagcggggcgagtctcacaaatcagcttcctgttattaataaggttaagggcgtaatgacaaattcgacaaagcgcacaatccgtcccctcgcccctttggggagagggttagggtgaggggaacagccagcactggtgcgaacattaaccctcaccccagccctcaccctggaagggagagggggcagaacggcgcaggacatcacattgcgcttatgcgaatccatcaataatgcttctcattttcattgtaaccacaaccagatgcaaccccgagttgcagattgcgttacctcaagagttgacatagtgcgcgtttgcttttaggttagcgaccgaaaatataaatgataatcattattaaagcctttatcattttgtggaggatgatatggatacgagtctggctgaggaagtacagcagaccatggcaacacttgcgcccaatcgctttttctttatgagcccgtaccgcagttttacgacgagtggatgtttcgcccgcttcgatgaaccggctgtgaacggggatagccccgacagtcccttccagcaaaaactcgccgcgctgtttgccgatgccaaagcgcagggcatcaaaaatccggtgatggtcggggcgattcccttcgatccacgtcagcctagcagcctgtatattcctgaatcctggcagagcttctcccgtcaggaaaaacaagcttccgcacgccgtttcacccgcagccagagcctgaatgtggtggaacgccaggcaattccggagcaaaccacgtttgaacagatggttgcccgcgccgccgcacttaccgccacgccgcaggtcgacaaagtggtgttgagtcggttgattgatatcaccactgacgccgccattgatagtggcgtattgctggaacggttgattgcgcaaaacccggttagttacaacttccatgttccgctggctgatggtggcgtcctgctgggggccagcccggaactgctgctacgtaaagacggcgagcgttttagctccattccgttagccggttccgcgcgtcgtcagccggatgaagtgctcgatcgcgaagcaggtaatcgtctgctggcgagtgaaaaagatcgccatgaacatgaactggtgactcaggcgatgaaagaggtactgcgcgaacgcagtagtgagttacacgttccttcttctccacagctgatcaccacgccgacgctgtggcatctcgcaactccctttgaaggtaaagcgaatagccaagaaaacgcactgactctggcctgtctgctgcatccgacccccgcgctgagcggtttcccgcatcaggccgcgacccaggttattgctgaactggaaccgttcgaccgcgaactgtttggcggcattgtgggttggtgtgacagcgaaggtaacggcgaatgggtggtgaccatccgctgcgcgaagctgcgggaaaatcaggtgcgtctgtttgccggagcggggattgtgcctgcgagcagtccgttgggtgagtggcgcgaaacaggcgtcaaactttctaccatgttgaacgtttttggattgcattaaggagcgaggatgagcattccattcacccgctggccggaagagtttgcccgtcgctatcgggaaaaaggctactggcaggatttgccgctgaccgacattctgacgcgacatgctgcgagtgacagcatcgcggttatcgacggcgagcgacagttgagttatcgggagctgaatcaggcggcggataacctcgcgtgtagtttacgccgtcagggcattaaacctggtgaaaccgcgctggtacaactgggtaacgtcgctgaattgtatattacctttttcgcgctgctgaaactgggcgttgcgccggtgctggcgttgttcagccatcagcgtagtgaactgaacgcctatgccagccagattgaacccgcattgctgattgccgatcgccaacatgcgctgtttagcggggatgatttcctcaatactttcgtcacagaacattcctccattcgcgtggtgcaactgctcaacgacagcggtgagcataacttgcaggatgcgattaaccatccggctgaggattttactgccacgccaagtcctgctgatgaagtggcctatttccagctttccggtggcaccaccggcacaccgaaactgatcccgcgcactcataacgactactactacagcgtgcgtcgtagcgtcgagatttgtcagttcacacaacagacacgctacctgtgcgcgatcccggcggctcataactacgccatgagtagcccaggaagcctgggcgtctttcttgccggaggaacggttgttctggcggccgatcccagcgccacgctctgtttcccattgattgaaaaacatcaggttaacgttaccgcgctggtgccacccgcagtcagcctgtggttgcaggcgctgatcgaaggcgaaagccgggcgcagcttgccagcctgaaactgttacaggtcggcggcgcacgtctttctgccacccttgcggcgcgtattcccgctgagattggctgtcagttgcagcaggtgtttggcatggcggaagggctggtgaactacacccgacttgatgatagcgcggagaaaattatccatacccagggttacccaatgtgtccggatgacgaagtatgggttgccgatgccgaaggaaatccactgccgcaaggggaagtcggacgcctgatgacgcgcgggccgtacaccttccgcggctattacaaaagtccacagcacaatgccagcgcctttgatgccaacggtttttactgttccggcgatctgatctctattgatccagagggttacatcaccgtgcaggggcgcgagaaagatcagattaaccgtggcggcgagaagatcgctgccgaagagatcgaaaacctgctgctgcgccacccggcggtgatctacgccgcactggtgagcatggaagatgagctgatgggcgaaaaaagctgcgcttatctggtggtaaaagagccgctgcgcgcggtgcaggtgcgtcgtttcctgcgtgaacagggtattgccgaatttaaattaccggatcgcgtggagtgtgtggatagtcttccgctgacggcggtcgggaaagtcgataaaaaacaattacgtcagtggctggcgagtcgcgcaagtgcctgaaggagagaacacgatggctattccaaaattacaggcttacgcactgccggagtctcacgatattccgcagaataaagttgactgggcctttgaaccgcaacgtgccgcgttgttaatccatgatatgcaggactattttgtcagcttctggggcgagaactgcccgatgatggagcaggtgatcgcgaatattgctgcgctgcgcgactactgcaaacagcacaatatcccggtttattacaccgcccagccgaaagagcagagcgatgaagatcgggcgctgttgaatgatatgtgggggccgggcctgacccgcagcccggaacagcaaaaggtggtggatcgcctgacgccagatgccgacgacacggtgctggtgaagtggcgctacagcgcgtttcatcgttctccgctggagcaaatgctgaaagagagtggacgtaaccagctgattattaccggggtatatgcccacattggctgtatgaccaccgcaaccgacgcatttatgcgcgatattaaaccgtttatggtggcggatgcgctggccgatttcagccgtgacgagcatttgatgagcctgaaatatgtggccggacgttctggccgggtggtgatgactgaagaattactgccagcacctatccccgccagcaaagcggcgctgcgtgaggtgatcctgccgttgctggacgagtccgatgaaccgttcgatgacgacaacctgatcgactacggtctggatagcgtgcgcatgatggcgctggcggcgcgctggcgcaaagtgcatggtgatatcgactttgtcatgctggcgaaaaacccgaccatcgacgcctggtggaagctactctcccgcgaggtgaaataatggatttcagcggtaaaaatgtctgggtaaccggcgcaggtaaaggtatcggctacgccacggcgctggcgtttgttgaggcgggagcgaaagttacaggttttgatcaagcgttcactcaggagcaatatccctttgcgaccgaagtgatggatgttgccgacgctgcgcaggtcgcgcaagtgtgtcagcgactgttagctgaaacggagcgactggacgcgctggtcaatgcggcgggaattttacgcatgggcgcgaccgatcagctcagtaaagaggactggcagcagacttttgcggttaacgtcggcggtgcgtttaacctgttccagcaaaccatgaaccagtttcgccgtcagcggggcggggcgattgtcactgtggcgtccgacgccgcgcacacgccgcgtattggcatgagtgcttatggcgcaagcaaagcggcgctgaaaagcctggcgttgagcgtcgggctggaactggcgggtagcggcgtgcgctgtaatgtggttagccctggctccaccgacaccgatatgcaacgcacgctgtgggtgagcgatgacgccgaagaacagcgtattcgcggctttggcgagcagtttaaactcggcattccgctggggaaaatcgcccgtccacaagagatcgccaacacgattttgttcctcgcctctgacctcgccagccatattaccctacaggatattgtggtcgatggcggcagtacgctgggggcataagcatgatctggaaacgccatttaacgctcgacgaactgaacgccaccagcgataacacaatggtggcgcatctgggaattgtgtatacccgtctgggcgatgatgtgctggaagccgaaatgccggttgatacccgtactcatcagccgttcggtttactacatggcggcgcgagcgcggcgctggcggaaacgctgggaagcatggccggatttatgatgacccgcgacggacagtgtgtggtaggcacagaacttaatgcaacacaccatcgcccggtgtctgagggaaaggtacgcggcgtctgccagccgctgcatcttggtcggcaaaatcagagctgggaaatcgtcgttttcgatgaacaggggcggcgttgctgcacttgtcggctgggtacggcagttttgggatgaacccgacagaattagatgagattgcaggaaaactcggttaacggagtgatcgagttaacattgttaagttaaatattggtttcaactccgatttacatggttgctgtgttgttaaattgtacaaagatgttatagaaacaaaatgtaacatctctatggacacgcacacggataacaactatgaacaaaagtgggaaatacctcgtctggacagtgctctctgtaatgggagcatttgctctgggatacattgctttaaatcgtggggaacagatcaacgcgctgtggattgtggtggcgagcgtctgtatctatctgatcgcttaccgtttttatgggctgtatatcgccaaaaatgtgctggcggttgacccgacgcgtatgacgccagcggtgcgccataacgacgggctggactatgtgccgacggacaagaaagtgctgttcggtcaccattttgcggccattgccggagcaggtccgctggtggggccggtactggcggcgcaaatgggctacctgccggggatgatctggctgctcgctggggtggttctcgccggtgcggtgcaggatttcatggtgctgtttgtttctacgcgccgtgacggtcgcagcctgggtgagctggtcaaagaagagatggggccaaccgccggggtgattgcgctggtggcctgctttatgatcatggtcattatccttgcagtgctggcgatgatcgtggtgaaagccctgactcatagcccgtggggaacatataccgttgcgttcaccattccgctggcgctgtttatggggatctacctgcgctatctgcgtccggggcgtattggcgaagtgagcgtcatcggtctggtattcctgattttcgccattatctctggcggctgggtggcagaaagtccgacctgggcaccgtactttgactttaccggcgtgcagttgacctggatgctggtgggttacggttttgtggcggcggtgctgccggtgtggttactgctggccccgcgtgactacctctctaccttcctgaaaatcgggactatcgtcggtctggcggtaggcattttgattatgcgcccgacgctgaccatgcctgcgctgaccaaatttgtcgatggcactggcccggtatggaccggtaacctgttcccgttcctgtttatcaccatcgcctgtggcgcggtgtctggcttccatgcgctgatctcttctgggaccacgccgaagatgctggcgaacgaagggcaggcgtgctttatcggctacggtgggatgttaatggaatccttcgtggcgattatggcgctggtttccgcctgtatcatcgatccgggcgtgtattttgccatgaacagcccgatggcggtgctggctccggcagggacggcggatgtggtcgcttctgccgcgcaggtggtgagtagctggggctttagcattacaccagatacgctaaaccagattgccagcgaagtgggtgaacagagcatcatttcccgtgcgggcggtgcgccgacgctggcggtggggatggcctacattctgcacggcgcgctgggcggcatgatggatgtggcgttctggtatcacttcgccattttgtttgaagcactgtttattctgacggcggtggatgcaggtacgcgtgctgcgcgctttatgttgcaggatctgctgggcgtggtgtctcctggcctgaagcggaccgatagtctgcctgctaacctgctggcaacagcgctgtgcgtactggcgtggggctacttcctccatcagggcgtggtcgatccgctgggcggcattaacactctgtggccgctgtttggtattgccaaccagatgctggcagggatggcgctgatgctctgtgccgtggtgttgttcaagatgaaacgtcaacgttacgcctgggtggcgctggtaccaacggcctggctgctgatttgtaccctgaccgcaggctggcagaaagcgtttagcccggatgcgaaagtcggcttcctggccattgctaataagttccaggcaatgatcgacagcggcaatattccgagccagtatactgagagtcagctggcgcaactggtgttcaacaaccgtctggatgccgggttaaccatcttctttatggtggtcgtggtggttctggcactgttcagcattaagacggcacttgcggcattgaaagatccgaagccaacggcgaaagaaacgccgtatgaaccaatgccggaaaatgtcgaggagatcgtggcgcaggcaaaaggcgcacactaaagtcagagtgagggggggatgttggcgaatgttggcttagtgcccagggttccctctcaccctaaccctctccccggtggggcgaggggactgaccgagcgcgttgatagcatttgtaggccggataaggcgttcacgccgcatccggcactctttcagcaacatggttagcggaggccaagatgtttgatagtctggcaaaagccggaaaatatttaggtcaggcggcgaagctgatgattggtatgcctgattacgacaactatgtcgaacatatgcgggttaaccatcccgatcaaacgccgatgacctacgaagagtttttccgtgagcggcaggacgcgcgctacggtggaaaaggcggcgcgcgctgctgctaaatttgtacgtcaggctttaaagctttccacttttttgaacgctgcacgcaacgtatctggtgtcagcgtgactggcaggtaatgaatggactccaccggacgcagggtgtgggcaatcactttgtcgatctccgcctgattattgatatccacttccagctccgccagtgtagtcggcagatgaaaacgctgatacgctccagttaattgcgccagcacatcatcctgacccagcaaggcgctttgcaccagaattccgtaggcgactttggtgccgtggagaaacttctcggtttgcggcagcacggtcagaccgttatgcacggcatgagctgccgccacacgcgtaaaacgatcgcccagaccaccaaccatcccaccaccagcaataatagcatccaccacatcgcaaaaactttgcgttaactgttgattttgctgatcgctcagcgcctgttcgctactgtttaacaagacgtcgcgaatggcttgcgcattattgatccccagtcgcacggttagcggcaacgtttctggttgcggagccagcaccaccgcttcataccatttcgccagcgtgtcaccgatccccgccagcagatattgttgcggtgcattgaggataatctccggttccaccagcaccataaaattggcgtcgtcgaaaatctcataatgcagcgcctgtccggcatcattataccagacggagagcggtgtccaggcggcgcaggtggcggcgatcgtcggaacggcaacaaacggcagaccgagacggcgggcgagggctttcgcggtgtcgagcagtgcaccgccaccgacgccaatcaccacgctgcggtcgtcaccggactcagccgccagttgttgtacatcgctttcgctgcaatgaccgcgaaacaaaatatgctttgcccctggcagtccaaacgctggcggaagtttggtttgcgccgcagcaatggcgcgtttgccgtagatccacaccgcgcgagaaagttgttcatcagtgaaaaaatcgtgcaggtgattgaaacttcctggatgactaaagtagttagccgggccgacgaccacgcggataggattgtgaggcatgttgtgttgtccttattgttttatttagacatctaaacgtcttgattgccaaatactagcatcgtgttatagtgccttcaacacgcaacttcgtcaggtacaataaaaatgacaaataaccctctgattccacaaagcaaacttccacaacttggcaccactattttcacccagatgagcgcgctggcgcagcaacaccaggcgattaacctgagccaaggctttcctgattttgatggtccgcgctatttacaggagcggctggcgcaccacgttgcacagggggcaaaccaatacgcgcccatgaccggcgtgcaggccttgcgcgaggcgattgctcagaaaacggaacgtttgtatggctatcaaccagatgccgatagcgatatcaccgtaacggcaggggcgacggaagcgttatacgcggcgattaccgcactggtgcgcaatggcgatgaagtgatttgttttgatcccagctatgacagttacgcccccgccatcgcgctttctgggggaatagtgaagcgtatggcactgcaaccaccgcattttcgcgttgactggcaggaatttgccgcattattaagcgagcgcaccagactggtgatcctcaacactccgcataaccccagtgcaactgtctggcagcaggctgatttcgccgctttgtggcaggcgatcgccgggcacgagatttttgtcattagcgatgaagtctacgagcacatcaactttagtcaacagggccatgccagtgtgctggcgcatccgcagctgcgtgagcgggcagtggcggtttctagttttggcaagacctatcatatgaccggctggaaagtgggttattgtgttgcgccagcgcccatcagcgccgaaattcgcaaggtacatcagtatctgacctttagcgtgaataccccggcacagctggcgcttgctgatatgctacgtgcagaacctgagcattatcttgcgttaccggacttttatcgccagaagcgcgatattctggtgaatgctttaaatgaaagccggctggagattttaccgtgtgaaggtacatactttttgctggtggattacagcgcggtttctaccctggatgatgttgagttttgccagtggctgacgcaggagcacggcgtagcggcgattccgctgagcgtgttttgcgccgatcccttcccacataaactgattcgtctctgttttgccaagaaggaaagcacgttgctggcagcagctgaacgcctgcgccagctttaattatttaaccgtccaggcgcgggaatattgacggtcggcaaacaactcttgcaggccgttaatttgcttcaggcgcagcacttcgtcgctgtccattcccagctctttgccaattttattatcgtcccatcccaactggctaagttcacggacgatttcgctcatggcggtgatttgatggcgtccacgagcgcgattatgacgaatagtcgcggcgatgcgttgattacgcgtaccttccagacaggtcaccggcaaataaccttttaagcgtaattttaaactactactgcctttaccaatttcatggcggtgaaaaccatccacgatttccatggcatttttatccgtatgtgtgaccacaatgggttgggtaaaaccatctatttcaatggatttttgcagcagttttttttcgggtggtgccacgttgtttgggttgtaatcattaggcataagttggctgtttttaacccacagaacgcaatccactggctcttcacgaaaggggctaacctgatggatcgccatgcggatttcattaatcgctttgatgcgatcatcttccggcaagctggcgagaaattgcgttaaatcctgcgttaatcgttgttgcatagtatcccccattcctgacgttttccttttatccgttcgttataacgctgatagttcttgctttttgtggggctaaaacttaatgcccgacaccagtaatcgttattgagtaaaactttgcatatccgccgccaggaggggatatctttcgcgccaatgtccccttgctgggtttgtggaacctcgatgccttttttctgataccagtgcaaataaatggcgattttattgcggtaatgctcagctgttttttccggcatgctattgagcagcaataatgcatattcttgccagtctaaatgttctggcttgaggattttccgatgcccatagaaatgattgtcatgtccggcgtaaatgccgccactttttaccccgctgactcgtgcgcacatagcagcccagcgatccggttcgataacgtgatagagccataatccttgtcgttgctccgggccaaaaggttcgcaaattcgcatatgacgcagaggaacgcctgcctgatacattaggttatacagtgggttgcagagactttgatgatttgcataccaggtccagatatcagccactttccagtcgtaaatggggtaaatgtaccagctatgaccgcctggtgcggccgtagtccagggtttatcgtcggcaaaacgttgtttatttaaactggcgatggcgacaaaacggttgtaggactcatccgcacggatgccgatcatcatcgccgccggacgtttttgactaaaccattcggcaaactcacgtacaaattgttcgaaggtcatgcctggctggtaaaagcagaaaaagtcagggtcggttatcgcatcttggggaggttgacgtacccattcgacatcaggttcccagcactgccattcgggttggtattgactaagggaattttgcgtcgtaagcgggagcgcaacccagtaaaactcttcgatgacatcggtgtacaactcgcgcagggactgaacatagttaatggtgcaagagaattgcgcctcccagtcgataaacaaaacgcagatttttttgcccatttgtcgggcaagttcggctgtcagatgcagcattaaaccagagtctttgccgccagaaaaactgacacaaacgcggggtagggtgttgagtgtccaggtaatacgctctcgtgcagcttccagaatattgagcggaagaggaattttataaatagacatctgaagacgctctctgaacgttacagggtgatcagtgagataagtctgttaattataaagtaaacactgtaaagcagagtgttttatttttcattcgcgctgtgaataaatagatgaaagttatagtagctgtctgtagttatatatcaaaaactctcatttagacggtcaataaatcgggagaacaccaaattatttaaagaagatttattataggaaatgtaaagctttatactaggtaacggatgttctagttttatctcttttaagttaagaaagtcacggtaggaattataaagttcataggggactattcccagtaaatctgtaactgcaatgctattaatgattgtcagcaaagaggaaccacgaaaactgattttgcgattcataaatctctcgtctatttccatttgaatatcatcaacccctgcacttttagatattaattgggtgaactcttctgccataatttgttcataagtgctattgtcagtaattcgtggatgcctattactacaaattagagtattgcgaatcgtatgcaatggcatgcaaatgacggaacggctgatcactggcatttgggtgatcaccagatcggctttgcggtgaaccaacagttcttcagcattctctgcactcatgaggatatcatggcactcaatctcgacagaggaatcttgccgtaggcagcggatcagcatactattattagagcaagaaatgagctgagggccgtagataataaagtttttctttagttcggacttattgactatattaattgtttgttcaaggcctctgagatttttctcaagatggtgatgcagatttaaccctgttgtcgtcggcgcgataccttttccactgcgaatgaataaagggtcattaaattgcgcacgtaagcgttgtaagctctggctcacggcacttggggtgatatatagactttcagcagctttgctaatgcttaaatgctggtaaatacactcaaatatgacaagaagatttaagtcgaactttttcaagtcgtagagattggccatacactactccggttatatttttcttccatgatatattcacttaatcaatgttttttgcgtatatatttttattgattatgtttttttgcttaactcaggattaagtttttctaaaatagcacagccacttagggcagagcgagcaattcatgcttttttaggatggttgaaaagcagggatatagttcaaccatccatgaattaccttttatttattccccataatgatattaagcgttttctgatcgggcaaccccacggcctgttgtagcgtattttccttactcatgtaatagatagccggcgtgacatttgcccccagatcgtccatcagtttctcattgtcacttaacactttcatttgctctgtacttacgtttgcaggcacgtttagcttaagcttgccaccagaggcttcatattgttgccaggtttttgcgggatctttggaggcaagaattgccgctgctgtcgccgggctttctggcttgataaccccaaccaacaatgttcttaattgcactttgccagaatctacccacgggcgcgcctgctgccagaactgtttacaatatgggcagaacggatcggcgaagacgtagacaatgaccggcgcatcttttttaccgtcgaggagccagtgggattgttccatccgttgccacatttcgcgtccggctggtgcgtaaatttctttttcgataagtgtgttactcaggttttcacctttctcgttgtacatgtaaccagagatagcgtgcttaccatctggagtcaggtagatggtgacgcccatatcctgatactttccgagataacctttcattcctccgggggcatcgaatgttttgatgattgtaatgccctgtttttcaatcgcttttactggagcaggaagttcctctgcgaaggcgattgcaggaagcagagccagtaaaagtatcttttttaacattaatttgtccttttcagtcagtgcaaaagtcgagtaaaaggcataacctatcactgtcataggtaagagcttagatcaggtgattgccctttgtttatgagggtgttgtaatccatgtcgttgttgcatttgtaagggcaacacctcagcctgcaggcaggcactgaagataccaaagggtagttcagattacacggtcacctggaaagggggccattttactttttatcgccgctggcggtgcaaagttcacaaagttgtcttacgaaggttgtaaggtaaaacttatcgatttgataatggaaacgcattagccgaatcggcaaaaattggttaccttacatctcatcgaaaacacggaggaagtatagatgtccttgattaacaccaaaattaaaccttttaaaaaccaggcattcaaaaacggcgaattcatcgaaatcaccgaaaaagataccgaaggccgctggagcgtcttcttcttctacccggctgactttactttcgtatgcccgaccgaactgggtgacgttgctgaccactacgaagaactgcagaaactgggcgtagacgtatacgcagtatctaccgatactcacttcacccacaaagcatggcacagcagctctgaaaccatcgctaaaatcaaatatgcgatgatcggcgacccgactggcgccctgacccgtaacttcgacaacatgcgtgaagatgaaggtctggctgaccgtgcgaccttcgttgttgacccgcagggtatcatccaggcaatcgaagttaccgctgaaggcattggccgtgacgcgtctgacctgctgcgtaaaatcaaagcagcacagtacgtagcttctcacccaggtgaagtttgcccggctaaatggaaagaaggtgaagcaactctggctccgtctctggacctggttggtaaaatctaaatttccttcgtctttcacgccatagcggcgttggcgtcgcccgctcaccccggtcacttacttgtgtaagctcccggggattcacaggctagccgccttgctctgacgcgaaatacttcggaaattcacctaattcttcgggtgctgcggcacccgattttcttccccgcaccatgatgcaagctgcatccaggtagccgcagaggccgcttgcatgatgatgtttaaagcccaggagataaacatgctcgacacaaatatgaaaactcaactcaaggcttaccttgagaaattgaccaagcctgttgagttaattgccacgctggatgacagcgctaaaagcgcagaaatcaaggaactgttggctgaaatcgcagaactgagtgacaaagtcacctttaaagaagataacagcttgccggtgcgtaagccgtctttcctgatcaccaacccaggttccaaccaggggccacgttttgcaggctccccgctgggccacgagttcaccagcctggtactggcgttgctgtggaccggtggtcatccgagcaaagaagcgcagtctctgctggagcagattcgccatattgacggtgattttgaattcgaaacctattacagcctctcttgccacaactgcccggacgtggtgcaggcgctgaacctgatgagcgtactgaacccgcgcatcaagcacactgcaattgacggcggcaccttccagaacgaaatcaccgatcgcaacgtgatgggcgttccggcagtgttcgtaaacgggaaagagtttggtcagggccgcatgacgttgactgaaatcgttgccaaaattgatactggcgcggaaaaacgtgcggcagaagagctgaacaagcgtgatgcttatgacgtattaatcgtcggttccggcccggcgggtgcagcggcagcaatttactccgcacgtaaaggcatccgtaccggtctgatgggcgaacgttttggtggtcagatcctcgataccgttgatatcgaaaactacatttctgtaccgaagactgaagggcagaagctggcaggcgcactgaaagttcacgttgatgaatacgacgttgatgtgatcgacagccagagcgccagcaaactgatcccagcagcagttgaaggtggtctgcatcagattgaaacagcttctggcgcggtactgaaagcacgcagcattatcgtggcgaccggtgcaaaatggcgcaacatgaacgttccgggcgaagatcagtatcgcaccaaaggcgtgacctactgcccgcactgcgacggcccgctgtttaaaggtaaacgcgtagcggttatcggcggcggtaactccggcgtggaagcggcaattgacctggcgggtatcgttgagcacgtaacgctgctggaatttgcgccagaaatgaaagccgaccaggttctgcaggacaaactgcgcagcctgaaaaacgtcgacattattctgaatgcgcaaaccacggaagtgaaaggcgacggcagcaaagtcgttggtctggaatatcgagatcgtgtcagcggcgatattcacaacatcgaactggccggtattttcgtccagattggtctgctgccgaacaccaactggctcgaaggcgcagtcgaacgtaaccgcatgggcgagattatcattgatgcgaaatgcgaaaccaacgtgaaaggcgtgttcgcagcgggtgactgtacgacggttccgtacaagcagatcatcatcgccactggcgaaggtgccaaagcctctctgagtgcttttgactacctgattcgcaccaaaactgcataagaagaagtaagattcacctgcaattgcttagccgccggggtcaaacctggcggcttttttatggcattaaaaagccccgccgggatggctccgggcagggcgggatacttattctggcaattaacgcacaaccagcaccggcagattggcgtggcggatcacgctgctggcgttagaacctaacagatgggtgctaatgcttgggttgcgagaaccaataactacaacatcagcccccagttcttctgccaactcattgacttcatcccgcacgctaccaaaacggacatgttgtttaatgcgggaaggatcgatggtgaagtggctgaccatcgtttgcagacgttcttgtgcttcatgttgcagatgctcttcaaaacgacgcacatcagcggcaaaacggtgcaggctcaggctggcactcccgggtagtacgtgaagtagatgaataactccgtcatcctgggcgaggaattcagcgtggcgaacagctttgtcgctcaattccatttcaaatacatcaactggcataatgattgtcttatacataaccctttctccctgttaatcatgaacaaatcattcgccatgattataatatttatccctgatatttgtctggttctttttccttacgaactgtttctgtgatgaatatattctcactgaacaccaggaattctcccaaaacctgtggtaccgcccgttttcccgctgtgatagctacccttaaagactgactcttttttgaactgtctctggaggttgcatgaaagcattgacttatcacggcccacatcacgttcaggtagaaaatgttcccgatccgggcgttgaacaggcagatgatattattctgcgtattacggcaacggcgatctgtggctctgacctccatctttatcgaggcaaaatacctcaggttaaacatggcgatatttttggtcatgaatttatgggggaagtagttgaaaccggaaaggacgtaaaaaatttgcaaaaaggcgaccgagtggtaattccgttcgtcattgcttgtggcgactgttttttctgtcgattgcaacaatatgccgcctgcgaaaataccaatgcgggtaaaggcgctgcgctcaataaaaaacagataccagctccagcggcattgtttggttatagtcacctgtatggcggcgttcctggtgggcaggcggaatatgtccgcgtccctaaagggaatgtggggccgtttaaagtaccgcctttgcttagtgatgataaagcgcttttcctttctgatattctgccaacggcatggcaggcagcaaaaaatgcgcagatccaacaaggtagtagcgttgcagtctatggtgctggtcctgtgggattgttgacaatcgcctgtgcacggttgctcggtgcggaacagatttttgttgttgatcatcatccctaccgcttgcatttcgccgccgaccgctacggcgcgatcccgattaattttgatgaagacagcgatccggcacagagtattattgaacaaacggcaggtcaccggggcgtggatgcagtaatagacgccgtcggttttgaagcgaaaggcagcaccacggaaacggtgctgactaacctgaaactggagggcagcagcggtaaagcgttgcgtcagtgtattgcggcggtcaggcgtggcggcattgttagcgtaccgggcgtctacgctggatttattcacggtttcctgtttggcgacgcctttgataaagggttgagctttaaaatgggacagacccacgttcacgcatggctgggagaattattaccgttaattgagaaaggattactgaaaccagaagaaattgttacccactatatgccgtttgaagaggccgcccggggatatgagattttcgaaaaacgtgaagaggagtgccgtaaggtgattctggtacccggtgcacaaagcgcagaggcggcgcagaaggcggttagtggtctggtgaatgcgatgccggggggaacaatatgatcgtcaggagtggttttcgaggtaaaggacagccatgacgataatcgccgccataatcagaaatcctatcaggatgtaaaatgcttctgccatggttattcccacaaacgaaacggaataattttgcagcaaaagtgaacagtgagaaccaggaaaaattgctgattttgcgtaaagaggatgcgagtgcatcctctgggcaaagcgagttatcgcttgtgcagatgggattaaagcaggtagtcgccagcagcttctggctggtattcgagttccagcacttcaaggtgggttgcaacgccgcccggaagttcccagtgaatggaatcgccaacgcgcagccccagcagtgcggcacctaccggagccataacggaaagctgagtattgctatcggtcatttttgccggatacaccagcgtgcgcacacgcacttcgccatcgctaagattgcggaatttaacccggctgttcattgtcaccacgtcgtgtggcatctcttctgggctacacatttgggcgcgatccaactctgcgtttaacgcgtcggcgattggcaaaccagcataggcgggttgctccagcagaatatcgatgcgttcggcatccaggtcgttaatgatgatagttggtctggacatttttactccatgtcgtcggtgctgcgagtgtcgcagataaacatacccaaaagaaaaccctcaccgtcaggcggcgagggtttaactcacatgatgatactgactgttgctcactctttgaagtgatttgcgtcacattcagggaattcctcaatgcagcgcattatgtataaatcttaatcgccttggtttatggaagacgaattagcgtgttttgtaaatcagatgattaataacccgctttatcaatcacaaaggttttgccacagttacctgggtgaggttgtggcaagaaactgtttgcagaaagcggagcgttgatggcgtcagctttgatgctgatctgaatttcagtcaaatacgcagggttaccctggcacgttagcttaactgctttcacgttctcttttccccagcttttggcaaaggcggcgtcaaagtcacggcggctcactgttttaccgtaattatccgcaaggaattttccggcttcgctctctttaatttcttgattcaggcgtaccatcgtaccgaagtatgcgtccggatcaaaaccaaagcaggcaccgtgtttggcatattcgtagcgttccaggcaggaacgtccgccagctcctggcatgacttcacttagtttagcggccgtttccagacttaatccggtttccgggctactacacattcggctggcgcgcgcttctggtagattcgggattgggcgagtagcgcaaccgaagcgcatccagcggcgttcatcaacaccacgggcagcaacgcttttaggcaatcctggccacagaccatgtacggtcagaaaatcagctttgttggtcgtttcggtttgcaggcgacattcatctcgttcgttacgatttcgatcgtgttgactctggcaaaatccggtttgccaggagagggccaggacatagcgatcaaaatcgccatactgttttgcctgcaacgctaaggcgttggcagaagagaagggaagcagagaaaccgcgagcaacgcggcgttacgccagaatgctttcataatgggtgtggaactcatacatacactgaatactatctattaaatcataaaaaagcccgccaggtgggcttacctggcgggcgtgatgatttattcagcgtttggcgaacgtattagttccacatggcgagaatcggccagccaaccaacagcaacatagagatgtaaatcaccccgaagattgcgccaagacgccagtaatctttacttttcacatagccacagccgtaaataatcaccccaggaccggttgcatacggcgtcagacagcccatgataccgatagacagcaccagcaggatacacagttgttccattggtacgcccggaatacctttaccgacggccagaataaccggcagcatggttgcggtgtgcgcagacaggctggcaaacaggtagtgtgcaaagtagaacaccagaaccagtacaatcaccgttgcgtttggactgaatccttccaggtgcgtactcatggtaccggcgaaccagtcaataaaaccagaacgagtcaggccgttagccatcacaaccagagttgccaggttgaccagtgtgttccatgcgctgttatagcgggtaatgtctttccaaggcacaacgtgcagggccagcattaggctaactgccagcagaccaaccgcagtagcattaatgacttcactgccaaatacccacaaacctaagctgagcaatacaaggccaatcagtgtccactctctgcgtgtcagcgcacccatggttttcagttcatcacccgcccaggttgccacttcttcactgtgtgtgatttccggtttgtacagcacgtaggaaagccacggcgcaatgataagcaagataaccccaaccggcaggaagcagaggaaccactgcaaccagctaatctggataccggcaattttgctgacgaactccagacccagcacgtttggtgccgcaccggtgacaaacatggagctactcagactggtactaatgaccatcatccacatcaaatagccgccaatacgacgcgcggacggatcgttcgggaaacttttaaacaacggcggcaggtttttaatgaccggaaaaaccgtacccccggtacgcgcggtgttggaaggtgtaaacggtgccagcagaatgtcgataatgacaatcgcataacccaacgtcagcgtgcgtttgcccatgaatttcaccaggaaaagggcaatgcgacgacctaacccggaaacttcataccctaatgcaaaaataaatgcgccaaataccagccataccgtggtgctggaaaaaccagccaggccccatttcagcgcctgtttttgcgcattaaacgctgggtcagctaattctttggcatcaaagagcaggtaattactgccaataacgcaaatagtaaccgcaataaaactgatcgctgttgccggaattggctcgaggatcatgccgacaatcattgccacaaacacagcgaagtaatgccatgcctgcggcggcataccgtcggggacagggataagaaacatgacacccatcaccaccagtggggccaatagtttccatatattatcttttgctaaagacatacgggttctccgaaaattaatatttccaaatttatcaagtgcttaaataattaaatctgtgctaaaaaccaggtaaggatcagtaggtcagcactgccgcctggactgagatttcgttcgatacactccctgtcgaactgccggagataatcgagatcggcgggggttcgaatgccccctttttgcaataatgtttgcgcctcgcgctgtagccagcgcaggcccccctcgccaccgcggcttgcaacgttggtatcgccgttgatcgccatcagtaggagcaaggtatcgagcaatgccagttcaggatctaacccctgatccagcagagtgaggtaatgcggcaaggcgtgattgatcaccagtggataacccgcttcggcttcaccgcgtgcgccggtaaggccaagctgttggtacaaccgttgacctgccgtcagttgactattattggtacgcagttcgcgatcggtcaggccacggcagaaacttgccgccgtagaacaaacggttgttggcgttaccggttggttgagttgaagcaaacggccaattgccgcacatagcagccctaaagaaaaaatgctgcctttatgcgtgtttacgcccgcagtggcgcggaacatatcaccttcgcaagccataccaattgggcgtaatccgtggagtaccgcttctggtgccatttccgcactacaggcaccaaattcaatgaaacggggtagccagccctgaatcgccagcgcgctgcggtggaaatcttccagcgccatatctttgtgcgcaccgcagttaatgcgatccacgaggcctggtttcggactcagattgacttcagtcagcatggcgcgccagcccagcagggcgtactcatcgattaaactcgtcgcaagctttgtggttttagtactcgttgcaggcatgctcatcgttcagcagtgcctccatgttatttagttgacgttgcaggcatcgacatcgttcagcagtgcctccatgcggttgagtaaatcggtcagttgatgggtttttccacgcgcgcagacggctgcgctttgttcgcacaacaggcagcggcgaggcggcagactatagtcgcggcgggagagaatttcgccttcgggcgtcaggacatcgatatcccataaccgcccgagaggatgactatgttcaagctcaatggtggcgagcttgaggtcgcgagccggggcggcaatgctcaacatgccctccggcccgctggcggaaaccagtgcagcctgctcctgaatttgccagccctgttttgcggctaaggcacgcaaggctgtcacgccatgattaaaaattcggcgtgtgacctcgctgtctttaatcggcccaggcgcaaccacggtaaaggagaccagtggaacaggatggcgcttgagccagacgtgttgccgtgcttgcctttcatcccggctgacgagcagctcgggaatacttaccgcatggtggctggcgagttcaggaagcaggtgcatggcttattccttcacctgatgcacaacatcgatcacgctgccatcgcggtaacgcacaacggcaacgacgcggtctgtgaattcaatcggctgtggttcaccggtcagcagacgcgcacgttcgcgcagccactcaatggaaaccactttaatgcccgcttcctgcagacgttctgccagttccggacgtgccgggttaactgcgataccgtggtctgtgaccagaatatcgacactggagcctggggtgatgcaggtcagtacgttatccaccagagtcggaatacgaccgcgtaccagcggcgcgacgatgatggaaagcgcagaggcaatcgcggtatcgcagtgaccaccggaagcaccacgcagtacgccgtcagagccggtcagcacgttaacgttgaactgggtgtcaatttccagcgcgctcagtaccaccacgtcgagacgatcaacgcttgcgcctttgctaccccagttagcgtactggttggcgctgatttcgatgtgattggggttacgggccaggctttgcgcagcatggctgtcaaagctctgcacatccagcagtttgcggatcagacctttttcgtgcaggtcaaccatcgtcgcggtaataccgccaagggcgaagtcggcgcgaatatcgcggctacgcattttgtcttccaggaaacgggttaccgccaggcttgcgccgccggtgccggtttgcatggagaaaccttctttgaagtagccagagttgacaatcacatccgcagcgctacgggcaataagcagttcgcgcgggttagtggtcatacgggtcgcgccagcgccgatttttgcagcatcgccaacgcggtcaactttgacgatcaaatcaacctgatcttgctcaatgcttgccggattatgcggataaggcagcagttcttcggtaagcatcacgacctgttttgcgttgtcggcatcaactattgcatagccgagggagccgcagcaggctttaccggtgtagccgttggcattaccgaattcatcacaggacgggacgccgaggaaagccacgtcgatattcagttcgccgctctgtaccagatgcacacgaccgccgtgagagtggatctgcaccggttctgccagcagaccacgggagatctcttccgccagtggaccacgcaggccggaggtataaatgcgggtaaccacgccctggcgaatgtgttctaccagcggcgcatggcaatcactcagggagctggacgccagggtcaggtttttaaagcccatcttcgcgatgacgtccatcaccatattgacggtcaggtcaccgccacggaaagcgtgatggaaggaaaccgtcatgccgtcctgtaaaccagagcgacgaatcgcttcttccaggttggcgcacagtttgcgatcgcgcgctttttcagcctggtaggtttgctttgggctgttctggaaagcggcaagatcgcattcagcgcgacgattccaggccgctacccgttcttgtcgttgagattgttcaattttctgcgtcattttgattgccttattcttcgcggatgccggaaagttctgcacgggagagcaccagacgggcgcgatcgataaccggaccgtccaccatcttgccgttcagggaaaccacgccgaggccttcgcgagcggcggcttcagcggcttctacgacgcggcgggcgtgatccacttctttctgggtcggtgcgtagaggttgtgcagcagatcaatctgacgcgggttgatcaggcttttgccgtcaaagcccagctgtttgatgtgggcggcttcttgcagaaatccggcttcgttgttagcgtcggaatagacggtatcgaacgcctgaatacccgcagagcgcgcggcctgcaaaatggaacagcgtgcgaacagcagttcagttccttccggggagcgttctgtacgcaggttgcgcacatagtcttctgcaccgagggcgataccgatcaaacgctcggaagcgtgagcgatttccactgcgcgggtaatccccagcggagattcaatcgccgccagcaggccggtgctgccgggttcacgaccacaggctttttcgatacgcaggatctctttttcaatatccagaacatcctgagcggtatcggttttcggcagacgcacaacgtccgcaccaccgcgaacgacggcttccaggtcgttaacaccccattcggaatccagcgcgttgacacgcacaatggtttcaatatcgcgatacagcggatgttgcagcgcgtggtaaaccatgcggcgggcggtgtctttttcacgcaatgctacggagtcttcgaggtcaaacatcagggcatcagccgggtagatgaaggagttgctgaccatcgcggcattggcaccaggcacaaacaacatgctgcggcgggtgcgagttttacgttgttgcaggctagcggaaatcattggcaatcctcccatggcagagccgggataccgctggcgcgtgccagcagggcttccagtcgtgcacgtaaaatgcagtacagtgcgcctttgtcatcgacattcagctgtacgccgcgcacgttgtagcgggcgagaacgtccagaatggtggtgcgaattgcatcgccaaactgtttctcaacgctgctattgatttgcaggtcgatatcctgcgtatcgagtggggcgatgcgtatcatcacatccccagactcaagggtgcctgcaacggcgggctggtttattttcatttttcacctgtttctcatgcgggggtcttttgacgagctgccgcgtcctggcgggagtgctcaagcaggttctgcaaataatgcagcgtgactgcagggaccagcggcgcgatagccgtgagatcgtttttcgccagcagttgacgtacccgggaagcggatatcggcatctcctggtaacgcagccgctcaatttcaaccagttcgatgggcggtgcggagatagtcggcgtttccagccagtagcgcatatcctggttgtactgggcggtaacgcgacaaaagggttcagtaccgacaaagcggtgagttacacccagcgcgggagcgaggtactgacggaaaatcttcagatcaatttcggtgtaacaatggttaatgacgctctgttctttaatgaagtagcaagggaacgtagcgcgggagatgatgtattcggagccacgatgcacagtcaggcgtggaatatcggcggtgccttttaacaccaaatccagccggtcttcataggggaagcgactagaatcttctttgactaaaaacagatgcaaccagtcgcactgtgccgcagcctgttgaatcagataacggtgaccattcgtaaagggattggcgttcatcacaatgcagccaatcttgttccctggatgacgaaattttttcaggctttcggcatagcgtttcagtcgcgtggcgctgttttccatcagcaccatcacgccgggtacgctggtcagcgtggaaaaaccgcactggcggaacagcgcctcgtattcggttttggtataaataaacagatgcgtgctgtgccgctcataggcgaggtttatcaattcagtggctaatgtcagcgccagtccttcaccgcggacggattcactgatagcaacgcatttaataatatttccggcaattccaccgcacgcgataagcttttcatcgcgggttacggtaataaatacttcgactgtggtgtcaacgctcaaatcattttcatgcaggaattgggcgatttccgccatttttttattttcactacgttttacgcgggtgaaaatatcattgccgaacataataaatagtatcctgaaggtgcatgttgttatcgatttgcaacgaatgttgttcaatgttgcaaactgataaccttttattttcacttgggagaaagggggtgatcgaggtatatctttttctcctttcgctatacatcctaaggagtatttcggcgtgaaattttgatttatttcacatagagttagtggttttttatttatttaatgattttaagttttttaattaatgtaattacgaaatgactcgcaggtttaagtgatttaattgatttaatgaataaaatttgccacgatcataattaatatctatgtattttgattcaacattttaattacatccgtcaaagaggctcgggacaacccgcaaggaaaacaatgttgcagcttaacgagaataaacagtttgcatttttccaaagactggcatttccgctgcgtatctttttgctgattctggtgttcagtatatttgtcattgcagccctggcgcaatattttacggccagttttgaggactatttaacgcttcatgtacgcgacatggcaatgaatcaggcgaaaattattgcctccaatgacagtgtcatctctgcggtgaaaacgcgtgactacaaacggctggcgaccatcgctaacaaattacaaagagataccgattttgattatgtggtgattggggaccggcacagcatccgcctttaccatcctaatccggagaaaattggttatcctatgcagttcaccaaacagggcgcgctggagaaaggggagagctacttcattaccgggaaagggagtatggggatggcgatgcgcgccaaaacgccaatctttgatgacgatggaaaagtcatcggcgtggtgagcattggctacctggtgagtaaaatcgatagctggcgggctgagtttttattaccgatggcaggtgtgtttgtcgtgctgttagggattctgatgttgctgagctggttcctggccgcgcatatccgtcggcagatgatgggcatggagccaaagcaaatcgcacgcgtggtccgtcagcaagaggcgctgtttagtagcgtttatgaagggctgattgcggtggatccgcatggttacattaccgccatcaatcgtaacgcaagaaagatgctggggctgagttcccccggacggcaatggttgggtaaacccattgttgaagtggtcaggcccgccgatttctttaccgaacagattgatgaaaaacgtcaggatgtggtggcgaactttaacggtctgagcgttattgccaaccgggaagctattcgtagtggtgatgatttgctgggggccattatcagctttcgtagtaaagacgaaatttccaccctcaatgcgcaactgacgcaaataaaacaatacgttgagagccttcgtacattgcgacacgagcatctcaattggatgagcacgctcaatggtctgttgcagatgaaagagtatgatcgcgtgctggcgatggtgcagggggagtctcaggcccagcaacagcttattgacagcctgcgcgaggcgtttgccgatcgccaggtggcggggctgctttttggtaaagtgcagcgcgcccgggaactggggctaaaaatgatcattgtccccggtagccagcttagccaactgccgccaggactggatagcaccgagtttgcagccattgtgggcaatttacttgataacgccttcgaagccagcctgcgtagcgatgaaggaaacaagatcgttgaattattcctcagcgatgaaggcgatgatgtggtgattgaagtcgccgatcagggctgcggcgttccagagtctctacgagacaaaatatttgagcagggggtcagtacgcgtgctgacgagcccggtgaacatggcattgggttgtacttgattgccagctacgtaacgcgctgcggtggtgttatcactctcgaagataatgatccctgcggtaccttatttagtatctatattccgaaagtgaaacctaatgacagctccattaaccctattgatcgttgaggacgaaacgccgctggcagagatgcatgcggaatatattcgtcacattcccggattcagtcagatattactggcgggaaatctggcgcaggcccgaatgatgatcgagcgttttaagccggggctaatcttgctcgataactatcttcctgacggtagagggattaatttactgcatgaactggtgcaggcgcattatcccggcgacgtggtgtttaccactgcagccagcgatatggaaacggtgtctgaagccgtacgttgtggtgtatttgattatctcattaagcccattgcctatgaacggctggggcaaacgctaacccgtttccgccagcgtaaacatatgctggaaagtattgatagcgccagccagaagcaaattgatgagatgtttaatgcttatgctcgcggtgaacctaaggacgagctaccgaccggcattgaccccttgacgctaaacgcggtgcgaaaactgtttaaagagcctggtgtgcaacatacggcagaaacggtggcgcaggcactgaccatcagccgcaccactgccaggcgttatcttgaatattgcgccagccgccatctgattattgctgaaattgttcacggcaaagttggcagaccacaacgcatataccacagtgggtgacatgataaagccggaggaaacttgcctccggcattactatttacttgcctgtgaccgctgctgccgttcctggcaccatcagctctgtagcaacgataacaatcaccaaaccaacaagcaccggtacgctggtgcgttttacgacttcaaacgggctgatcttcgccatcccggcaaccgcaacgactacgccagaaacggggctaagggtacggccaaggttactcgcctgcagcatcgggatagtcaaatacgccgggttaatgccggaagagtgcgccagtttcgggatcatctcaacaaacgcataaaacggcgcattgccactaccggtcgtgactgccgccagcattgtcagaatcaccaataccagcatcaggatgatactcgcgctaccaaagctggtagcgatagaaatcagactttgaataaagccgatggtgctaagcccctgagcgaataccccagcggcaaccagcagcatcaccacgttagcaaacgcatctgccatcccgcgataagccacttccagaccagagaaaactttctgggtattaaagctgcggaggaactccagaatggaggcaatcagcatacaaatcaccagaatagtgatgatgtgtaattgcggaccccatttaccgtcaaaaatcagtacaccgatgatcggcgtgaacggcaaaatggcataaaacgcaggagcagtggtggtgatttcactgacatctaacatttcatgagagatgtgctcttttttatccagataacgttgccagaagaagtgggcgatcgccatgccgataattgcagcaatactgataggcagcgtcgttttgaaggcgaagtcaatcaggctcatttcggaagcttgcgccgccagcaccacatccccactagtcggtgcgagaataatcgccgccggggaggcacaaatggcagcagctgcgccacgactgataccaacgtttaccatcaccggaaatagggttgccatcagcaaaacacccagaccggttgcggaagagacggccagagacatcagacaggcgacaaaataggcggcaatcatcagcaggtaaggggagttaatatactgcaatggtttactcgccagcttgaccaccatatcattcgcgccgatatgggtcatgtaagcggcaaatccacacagcatcataatcatcatgccgaggtcgccgccgcggctcattagtaatattttaacgtattcaacgatatccgtggcgctgtagcctgtactagcctggctggacggtaacactttgtgccccataatggcactgataatcagcaataacaggccaccgacaaataacacaccagtggcggaataccctttaatgatgtagcgagctacacccacaataaccacaaccccaataaggagctcaatgaatgtcagcataatttttcctgtctccaggccccaaagtaaataataaaaaattcctaaagcttaaggaaaaaatatgcccaataaattggcgatgaatgctgattaaaatcaagaaaaactgccattaagacattgaagttgctgtttttatacatagataacaaaacgcatatttagcggttggcaattatcacataataatgtgtgcaaattgatggtggattgatgcaaatttgttaattgcaatggtgttagctgcggctgtgcgctcaaaaaataatctaatatgagcataggttgacgatatatattatatacttcgttaagatgattgttgtatctcgttaaaaaataaaataatttttccttgattgcattttgtcatcaaaaaagacttggtttttcttttttgactattcccatcgcagaaaacgacgcatcatctttaatcgatgcgcggaaatatttaacttgaacaagcggaaataaatagagcagctattcagattattctttatgttgggtctattaaggttatgttaattgtagctttgctatgctagtagtagatttttgataaatgttttatggtcacaaatgaacgtgagtaaatatgtcgctatcttttcctttgtttttattcagttaatcagcgttggtaaagtttttgctaacgcagatgagtggatgacaacgtttagagaaaatattgcacaaacctggcaacagcctgaacattatgatttatatattcctgccatcacctggcatgcacgtttcgcttacgacaaagaaaaaaccgatcgctataacgagcgaccgtggggtggcggttttggcctgagccgttgggatgaaaaaggaaactggcatggcctgtatgccatggcatttaaggacagctggaacaaatgggaaccgattgccggatacggatgggaaagtacctggcgaccgctggcggatgaaaattttcatttaggtctgggattcaccgctggcgtaacggcacgcgataactggaattacatccctctcccggttctactgccattggcctccgtgggttatggcccagtgacttttcagatgacctacattccgggtacctacaacaatggcaatgtgtactttgcctggatgcgctttcagttttgagacaaatgaagttttagtaacttctttaaaatcaatagctaaaataagtaacatcaaaaataacgcgacttttatcactttttagtaaagttacactggacaaagcgtaccacaattggtgtactggtaaccgacacagcatttgtgtctatttttcatgtaaaggtaattttgatgtctaagattaaaggtaacgttaagtggtttaatgagtccaaaggattcggtttcattactccggaagacggcagcaaagacgtgttcgtacacttctctgcaatccagactaatggttttaaaactcttgctgaaggtcagcgcgtagagttcgaaatcactaacggtgccaaaggcccttctgctgcaaacgtaatcgctctgtaagatacgtcagcaagaattcaaaacccgcttaatcagcgggttttttttggtctttagtgtgcggtactggcgctaaacagccagaatgccagtgcggtcatggcaaaagaccccagaaggttgacgaaaacgttcagtaatgcccagccaaagcggccctcttgtaacaaaaacaccacttctgcgctaaatgtactgaaggttgttagaccgccacaaaatccggtggtgattaatactttccacactggatcaatgttcgtcatcctgctgaaccatgcgaatcctattcctatgatgaatgccccaatcaggtttgctgtcagcgtccccaacggaatcgcctgatgcagtgggttaaatcgcatacttaacagccatctcgccacgcttcccgtaccaccgccaataaaaactgctaaaagaagttgtaacactgcaaaatcctgctatttgatttgtatgagtgataagtgtaacgccgaataatcgtcgttggcgaattttacgactctgacaggaggtggcaatgctggttgccgcaggacagtttgctgttacatctgtgtgggaaaagaacgctgagatttgtgccagcttgatggcgcaggcggcggaaaacgacgcaagcctgtttgccctgccggaagcattgctggcgcgcgatgatcatgatgcagatctaagcgttaaaagtgcacagctgctggaaggcgaattcctcggactttacggcgagaaagtaaacgtaacatgatgacgacaattctgacgattcatgttcctagtacgccggggcgcgcatggaatatgctggtggcacttcaggcaggaaacatcgtcgcccgttatgccaaactgcatctctatgatgcatttgccattcaggaaagtcgccgtgttgatgctggtaatgaaatcgctccgttactggaggtggaagggatgaaggtcggtctgatgacctgttatgacttacgctttccagagctggcgctggcacaggcattacagggagctgaaatcctggtacttcctgccgcctgggttcgcgggccgctcaaagagcatcactggagtacgttgcttgccgctcgtgcgctggataccacctgttatatggtggcggcgggggagtgcgggaacaaaaatatcggtcaaagccggattatagatccctttggcgtcaccattgcggcagcgagtgaaatgcctgcactcattatggcggaagtgacgcccgaacgtgtgcgtcaggtgcgcgcgcaactgcccgtcttaaacaaccgtcgctttgcgccgccgcaattattatgatgtttttttactcggcgcttgattcaccttgttacagattgctattgtgtgcgcgcgtcgaatgaccgttaatattctctggtttttaaggcgcgttctgttgccggttatatgtcaagaaggtatctatgggtgagattagtattaccaaactgctggtagttgcggcgctggtcgttctgctgtttgggactaagaagttacgtacgctgggcggagaccttggagcggccattaaagggttcaagaaggcgatgaatgatgacgatgctgcggcgaaaaaaggcgcagacgttgatcttcaggctgaaaagctctctcataaagagtgacgtggcgagcaggacgctccctcaatatcttgttcgatacaaaaaacccgcttcaaaaagcgggttttttatcagacagatgtaagtaattattacaggattacttaacttccatccctttcgcctgcaaatcggcgtggtaagaagagcggacaaacggaccgcatgcagcatgggtaaagcccatcgccagcgcttcggctttcatttcgtcgaactcatccgggctaacgtaacgttgaaccggcaggtgatggcggcttggctgcaaatattgccccagcgttaacatcgtcacaccatgacggcgcaggtcgcgcattacctcaataatttcttcattggtttcacccagtcccaccatcagaccagacttggtcgggatttccggatgcgcttctttaaagcgttccagcagcttcaggctccagttgtaatctgcaccaggccgtacctgacggtaaatacgcggtacgttttccaggttatggttgaacacatctggtggcgttgcagtcagaatatccagagcacgatccatacgaccgcggaaatccggcaccagagtttcaattttgatttgcgggcttttttcccgaatggcagtaatgcaatccgcaaagtgctgggcaccgccatcgcgcaggtcatcacggtcaacggaggtgataaccacataacgcagcgccatatcggcaatggtctgcgccagtttcactggttcattggcatcaggagctaccgggcgaccgtgggcaacatcacagaacggacaacggcgggtacaaatagcgccgaggatcataaacgttgctgtgccgtggttgaagcattccgccaggttagggcaggaggcttcctcgcagacagaatgcaggccatttttgcgcattgcggctttgatgccctggatacgtgtagagtccgctggaagcttgattttcatccattccggcttgcgcagcagggcttcgcgctctgttgccacgtttttaaccgggataagggccatcttatcggcatcgcggtatttaacaccgcgttccatcacaatgggtttactcatagcgtgcgtgttccagttgcgaattacgaaggaaagcgtttcaattcaatagattgttgtaattatcaactatttttgaattaacgactggcagtatatcattgaaacggacctgaaagcagccaaagcggtcgcgaaaatgtaaaattgttgttggattgtgccattttatcgttctgcgctgtgatctggctgtaacaatactttttcaaaatgcattacggataacatctattactccgtgcaggatgggatcacgcaggctgaatttgttgtagtggatagagaaatctatttgctcctcatttaaggacggaaaaggcagtttttccagcggccagcagcggctaaacaggttataaaaacggctgggaataatcgctaacatgtcactgttggcaaccagtgcagcgattgtcaaaatgttgtagctggtgaaattgatttgccggtccggaaacatttcttgaactctctgccgcagaccgctgaaattttgctcttccggtaacagaagtacatgcgcagcgttgtcgatagtctctctgtcatcttctaaagagagtagtggatttccctcgcggcaaattaacaccatattgtcggtgaacagaacatgatgttgcaccgtacgattggtgcaaaacatgttatcgatgatgagatcggtttgaaactgactgagttggttttccgcgtcgctgatgggcgggttgcgcagtaaaagctgcggatagtgagttttaatcgcccgatagatgacaggaaggaccagtgctccgacgctgggagtggtcgcaatagttatcgttcgttgcttatcatagcttccttcgatatccagcgcgccaagaatggactcaaggccctgactgatatactcatgtagatgcatcgcaaatgcggtaggagtgacaccctggcctttgcgaataaacaatgggtcagggaatataacgcgcagtttctgaatagactgactgattgcgctgggggtcagattaagcactttcgctgcattaacgatccctttatgtacatatacagcttcaaaaatagtcagaaggttaagatcaatatttcgtaaggttgtaaatatttgtggtttaccttcactgctctttctgcttaaacagggttcaatttgattattactatccacgcacttactccaattttattcatggaaaaataatatttaaaaaattacaataatcttatgtctaattggaacggaacgcttttgctcaccataatcaactatttcaataggttaatcaatggggtgagttacggagcaaggcgtggcaccgcatttctgcaagtgataaagaaaatatacaaacgcgaaggagatgtaaagcattagcagatattatgagtaatgacccagtgtaaattgggccattgatgtatggaattaagcggtaatatattcgaagtccggattgtttagtagcgctaaaatattttccagtaaacgtggagcaatattattagtcgtcgcttcgggtttccattgacttattttagccatttccattccggcatacccacaaggattaatacgtaaaaatggactaagatccatattgacgtttaatgccagaccgtggaaactacaaccgcgtcgaatacgtaaacccagactgcaaattttcttttccccaacatagacacctggcgcgtcagcccgaggatgcgcttctatacccagttcagccagggtattcaccactgtttgctcaagcaaggtcaccagttcacgcacaccgagtttacggcgtttcaggttaagcaacacatacatcacctgttgccccggcccgtgataagtcacctgcccaccgcgatcgctctggatcaccggaatatcacccggcattaaaatgtgctccgcttttcctgcctgaccttgggtgaataccggatagtgctcgaccagccagatttcatcaagggtactatcatcgcgggtatcggtgaattcatgcatagcctgggagattggctcgtaaggctgaagaccgagctggcggacaagaattttatcctgatacaaaacggcatctccgtggagaatgagtaaaagtgggggaaaagtatatcacagcgaggagaggggagttacccgaccaggagccgggtaacggagaagcgagttacagaaccatgcggacaatatcgattttgcccagttcttcatacagtgtttcaacctgctcgatatgagtggcgttgatagtgatagatacgctgtggtagttgcctttgctgcttggttttaccgttggggtgtagtcacctggcgcatggcgctgtaccacttcaaccacctgatcaaccagctcaggtaacgcctgccccataactttgtaagtaaaaggagtagggaattcaagcagttcgttaagtttggttttcatgtcagctccggcgtaacgtaattaaatagcaactcccgccagaaggcgggagttttttactgatgcttagtatatggggacggaaattacactttcaagtgtttaatttttaaccaaaccagtgatggaacattaatttaatgtaatcaatgattttgccgaagaagttaccttccgggatttcttgcaacacaaccagcgggcgttgctcgatcgttttgccatcaagctggaagttgatagttccgacgacctgattcttttgcagcggcgcatgcaattcactgctgttcagcacatagctggctttcagatctttcatgcgaccacgcggaatggtcaggtacacgtctttatcaacccctaagctagcgcgatcagaatcaccaaaccaaaccggttcagaggcgaactctttacctactttcagtgggttaacggtttcaaagaaacggaagccccaggttagcagttttttactttcggcttcacggcctttaaaagtacgtccgcccattaccgcagaaatcaagcgcatctggccttcagtcgcagaagcaacaaggttgtaacctgctttgtcagtgtgtccggttttgatgccgtcgacattcaggctgttatcccataacaggccgttacggttcagctggcgaataccgttaaacgtaaattctttttctttatagatgctgtattcattcggtacgtcacggatcaatgcctggccgatcagcgccatatctcgcgcggagctgtactgaccatcagcatccagaccatgtaccgtctggaagtgggtatttttcaggcccagtgcgttaacgtagctgttcatcaagccaacaaaagcgtcctggctaccagcggcaaaatcggccatggcgacacaagcatcgttaccgctttgcaggttaataccgcggatcagctgagaaaccggaacctgcatgcccggtttgaggaacatcaggctagaacctttaaacaccgggttaccggtggcccatgcgtcgttgccgatagtgactaaatcagtttctttaaatttaccggctttcattgcctggccgataacgtaactggtcatcattttggtcaggctggcaggatcgcggcggacatctgcgttctgttcggcgagcactttgccggagttatagtcaatcaggatgtaggactccgcatcgatctgcggtacacccgggatcatagttttgatattcaggtcatcggcatgtgcagcagagataaaggctgtgcaaagagccgtggtgagcgccaggcgcttcatgatacgagcggaaaaaatggtattcatggtctgaactacgacatccgtgatggaattaaaaaagtgccctactatagcaaatgcactaccggcaggcatctgactttccgcgtgactttgttaacgtcatttacagaaattgacacatcagatgcctgctttacgttactgcgcggtagtaataaaactctgtaattgggcttcggtttgcaaacgttgctgcaaggtactggcttcggctttgctggcgaatgggccaagctggatccgccagaccgcgccattttgagttacgcgaccggggacgccgaacttctgtcccagttgctgttggtactgttgcgcacgagcctgatcgcttacggccccgacttgcaccataaagttgccgctggcgctttggctgacggcttgcggtgtcaccattgcagggctggttgcaggcgttgtgctcggagctgtaacaacgggctgtggcgcaggcgtcggttcgctgccttccagtacaccaggcgctaaggtcgttggtgcgccgaggaaaccgctactggttaccggcgcgccggtcggatcttcgctttttagcgtgctattactgaccggaagaatgtcaccctgcgggccagacacactacttgttcccgcgccaccgcttaaatcgggaggtgcaggcagggcgtaagtctgtttggcgactgtggtacaagccataccaggaccagaaaggctaccatcctgggcaacaataatcggatcgatacgaactttggtgttgttactcgtgttaagacggtcagctgccgcgcgagaaagactaataacgcggtcgttgccgtaagggccgcgatcattaatgcgcaccacgatcattcgcccgttagccaggttagtgattctggcgtagctggggatcggaagcgttggatgggctgccgtcagctgtgtcggatcgaatgcttcgccagaggccgtcaggttactgccgggttcggcatcatagattgccgccagtcccgcctggctaaatcgagacggatcctgcacgattttgtagcttttaccgtcgcgctggtaatcctgatttgccgtcgcgttcagtggttcgaaacgcgggtccgccccgctaatttcaactatagggccgttacataccgcaggctgcggtacacttaccgtctgttgctgaccatcatcgcttgtacatgccgcgagcattcctgccgcgatgcagatcccgagccactgcttacgcattgcgcacctcttacacgcttttgctcaacattttcctgtgggtgtggatactcattacaatcccgaacccagccatcagcacaattagcgcgcttcctccataactgaccagtgggagcggaacccctacaaccggcagaataccgcttaccataccaatatttacgaagacataaacgaataatatcagcattaagccgccagccatgacgcgaccaaaggtggtttgcgctctggcggctatccacagcccgcgcatgatcagcagaatgtagagagcgagcagaatcagaatgcccactaatcccagctcttccgccagtaccgcgaagataaagtcagtatggcgttcggggagaaattcaagctgactctgagtgccgtgcagccagcctttgccgcgtaatccgccggagccaatagcaattttagactgaataatgtgatagcccgcgccgagtgggtcactttccgggtccaggagcatcattacgcgctggcgctggtaatcatgcatcaggaagaaccacagaatcggaatgaacgccgctaccagcactactgcgacgccaatcagacgccagctaaggccagagaggaacagtacaaacagaccggaaagcgcaacgaggatacttgttcccaggtcaggctgtgcagccaccagcagcgtgggcataaatatcagcaccagcgcgatgccagtgttcttcaagcttggcgggcaaacgtcgcggttgataaagcgcgcaaccatcagtggtacggctattttggcaatttcgctcggctgaaaacgaacaataccgaggtccagccagcgttgagcacctttagagatggcaccgaaagcatctaccgccaccagcaaaataatacagatgatatagagatagggggcccagccttcataaacgcgtggaggaatttgcgccatcaccaccatgatgaccagacccatcgcgatttggccgattttacgctccatcatgccaatatcctgaccgctggcgctccagataaccagggcgctgtaaaccagcaatgccagtaagatcagcagcattgtgggatcgagatggactttatcccagaatgtttttttattcggattatccgtcatgattaatggtcctccgctgcggcaaccgctggattttccgcaggcagatcggtgttgttatcacccagcataatgtggtcgaggatctggcgcatcagtgtaccaaccgccggacccgcaccaccgttctccagaatcatggcgacagccacttgcggattgttgtatggcgcaaaggcggtcatcagtttgtggtcacgtaaacgctcggcaattttgtgcgcattataggtttcgttcgctttcagaccgaagacctgagcggtaccggatttcgccgcaattttgtacggtgcgctagcaaagtatttatgcgccgtaccgttagggcggttagcaacaccgtacataccgtctttcgccagctcccagtaaccggaatgaatatcgccgacgggcggttcatgcggctgtacccatggcacctgtttgccgtcttcggcggtgctcatcagcaaatgaggaaccttcacgataccgtcattaatcaggatcatcagtgccttactcatctggattggggtcgctgtccagtaaccctgaccgataccaaccggaatggtgtcaccctgataccacggttttttaaagcgtttctgtttccattcgcgggtaggcatgttgccggaacgttcttccgccaggtcgataccggtgtaatgaccataaccgaatttacccatccattcggagaggcgatcgatccccatatcgtaggccacctgatagaagaaggtatccgcagattcttccaggcttcttgtgacattcagacgcccgtggccccattttttccagtcacgataacgtttttcgctacctggcagttgccaccagcctgggtcaaacagcgtcgtattgcgcgtgatcaccccggcgctcaatgcgctaaccgccacatagggtttaactgtagacgcgggaggataaaccccctgtgtggcgcggttcaccagcggtgtattcggatcgttcaacaaggcggaataatctttgctggagataccgtcaacaaacaagtttgggtcataactaggcgtggaaaccagcgccagcaccccacctgtacgcggatcggtgactaccacagctgcgcggctacccgccagcagcgtttcaatatattgctggagtttgagatccagcgtcaggtaaatatcgtgtccggcttgcggtggtacttcttttaactggcgaataacacgcccacggttgttaacttcaacctcttcataaccggtctgaccgtgcagcacatcttcatagtaacgctcaatgcccagcttaccgatatcatgcgttgccgcatagttggccagtttgccgtcattattcaggcgttcgacgtctttatcgttgattttgctcacatagccgatgacgtgggtcaacgcgctaccgtaaggatagtaacgacgtttatagcctttaacttcgacacccggaaaacggtactgattgacggcaaagcgagctacttgtacttcggtcaggttagttttcaccggaatagaggtgaaacggtgactacgtgcgcgctcttttcggaatgcagcaatatcgtcatcggtcagatctaccacgctgcgcaaagcgtccagcgtttgctgcacgttatcgactttctccggcatcatttctatctggtagatagtgcggttgagggccagagggataccgttacgatcgtagataatgccgcggctgggcgcgataggcaccagcttaatgcggttttcattagagcgggtctggtagtcggtaaagcgaacaatttgcagattatacaggttggcgataagcacgccggtcagcagcaaaatccccaaaaaggcgaccagcgcccggcgcacaaacagcgcggactctgccgtatagtcgcgaaaagagttctgtagtttcatccgctgcgttttctactcaaagctcccttatcactcacggtgataaggatggttggtggtgatgctccacgcccggtacagactctctgcgaccagcacgcgaaccagcggatgggggagggtaagcgcgctcaggctccagctctgctcagccgccgctttacaggcagggctcaacccttcaggcccgccaatcagtagactgacgtcgcgaccatccagcttccagcgttccagctcagcggctaactgcggcgtatcccagggcttgcctggaatatcgagggtgacaatgcggtttttgcctgcggccgccaacatctgctcaccctctttgtcgagtatgcgcttgatgtccgcattcttgccgcgttttccggccggaatttcaatcagctcgaagggcatatctttcggaaaacgacgcaggtactcggtaaaaccggtttgtacccagtccggcattttcgttcccacggcgacaagttgcagcttcacgcattaactccagagtttttccagttcatacaggcgacggctctcttcctgcatgacatggacaatcacatcgcccaaatccacgacaatccagtcggcgctgttttcaccttctacgccgagcggtaacaggcccgctgcgcgagactcctgcacaacgtggtcagcaatggacataacatgacggctggacgtacccgtacagatgatcatgcagtcggtgatgctggatttgccctgaacgtctaaggcgatgatgtcctgacctttgaggtcatcaattttgtcgataacaaaatcctggagtgctttaccctgcaagttttccccctgggtgaatcaaatagataaaaatggtctgtcagtatacctgaaccagaggcgatttcgggacaattgtcgccgaatcggctttcgaaagtgggctatcatcccaccccgcgccgcagattgcatcgccatttttgtaaaacaatttctacaaagtcgtgtctggcggaaaaagtctggctgcggagaatatcagcctgcccgggtctgtcaatggtcgttgcggcttacccgtaaaaaaacagaaaagtcatgcattctcgaccccgatggcacggctattgaggacgcgtagcgtcgcgaatttttggttgatatcaatggcgctccaacacccctggtcaacgcgaaaatgccacatagcttcggcaggcatgccaattaaacgggcgattaacagactcagtacaccctgatggctgacgactaaaatattctgatagtgctgaaattcactaagccttgcgataaagcgttccacacgttggctaaatgcctgaaatccttcaccgttcgtggggattgcatgctgccagtcattgcaccacgcgctatagttttcggcatcttcttgcatgaggtcgcgatgatgtcgcatctcccagtcgccaaaaaacatttcgttgagttcaggtatgatttgcacggggagctggcggtcactgagaaccagtcgcgcggtatgctgtgcccgttccagttcactgcataaaaccagatcaaaggaaacaccatgtagcagcgtatgcagattttgcgcttgctcaataccgcgcgcggtcaggggggtgggcgcatgaccgctgtaaagaccatcgatattcgcttgcgtttcaccatgacgaattaaccacagtcgcatcatgccctccgtaacgacaggtatcagcgatacaagccttgttggttaatgtaagtcagtaccggttccggcaataaatcctcacaactttcaccgttttgcaaacgttcgcggatgatggtcgcgctgatgttaaaccacggcgtttcagccagataaattttaccggcaggctgaaggtgaagatcttccgggttatgtgtcaaatgatcttccagccattgctggtattgcggttgcgccatttcaagtgggtaacctggacgccgacagacgatcaaatgtgcattgtcgagtatcgtttcgtattcgtaccaggtcggaaaggtcagcagactatcctgaccaataataaacgccagcggcacgtccggtccttgttcctgccgccactctttcagtgtttgcgcagtgtaagagggggcattgcgctttagctcgcgttcatcaagagtaaataatggcttgtcggcaatcgccagttcaagcatgtgtttacgctgcacgctgttcgcttccggctggggacgatgcggaggaacattattagggatgattgtgacccgcgtcagaccaatcaaattcgccagcgtttccacgggttttagatgaccatagtgcaccggatcaaaggtgccgccaaacagagcctgtaaagatttcatatcaaccgtcgataaatacgtccgccaggggtttatggcacaacagaagagataacccttccagctctgcccacacactctgaccgtaatcttgtttgagggtgagttccgttcgtgtcaggagttgcacggcctgacgtaactgcgtctgacttaagcgatttaacgcctcgcccatcatgccccggcggttctgccatacccgatgcttatcaaacaacgcacgcagtggcgtatgggcagactggcgtttcaggttaaccagtaacaacagttcacgttgtaatgtgcgcaacaaaataaccggttcgctgccttccagacgcagttgctgaagaatatgcaatgcgcgcttactttttcccatcaacaaagcatcaacccaatgaaaaggggtgaaatgcgcggcatcattcaccgcctgttcaacgcgcggtaatgtcaatttgccgtctggccagagcaggcttaaacgctccagtgcctgagccagcgccagcaggttaccttcataacagtagcagagcacctgatttgccgcgtcatccagttctaagttgagctgttttgcgcgcgcagcaacccagcggggaagctgagcctgctccggtgtctgacaggtcacctgcacgctgcgattcgcaagcgcagtaaaccaggcggcattttcttgcgctttgcttaatttattaccgcggacgatcaacagcaggtcgtcatgcagaagtccggtgagtgtgagaagttgctcattgatcgccgcattcggtccgttttctggtaacaacagcaatagcgtttgtcgactggcaaacagactcatagcctggcataagctaaagatcgcattccagtcagtgttgggatcaatggaaaaagtgtggtgttcttcgaatccttgtgccgcagctacctgacgaacagcgtcctggctttcctgcaataacagaggatcgttaccaagtaaaagatacgccgcgcgcagcccttcattgagctgcgcgcggagttgttccgggtacaaccgaatcatcagttacccagcgtggtggagacgcgtgcaggcgttgccggagtatccgttgtggtgctcgtctgttcttcgtcggaacgaatatccgcagcacggatgcttggcagcttacgaatcagctgttcggcagcacggtcgtacatctcttttacgatcatgtcttgttcgttatctttcgctaacgccatttgcgggttatcgaagaagctacggaagactttggcgctaatcgggtagatatcacggccggggatcaacacggtcgcattaaccgtcatgatcatctgatactctgctgtttgaccgttacggaatacgcttgcggtatctttcgcgatgctcactttacccaaacgcaaggatggaacgtccttacgcgtggtttctttatcaagcaactcgacaccattcagacgtaactggttacgcaccgcacggcttaatggcccgttcggatcgccactgtccaggatcatgaccttcatagtggaaggaacctgcgtggtatcacgcagatgccagccacacccggcggtgattaacaccgccagagataacaacaatgttgccagatatcgcacgcttcctcccgcgcttagccaacgaccagattgaggagtttacctggtacgtaaatcactttacgtacagtaacgccatcaagatattttgctaccagatgttcctggccagcacgttcgcgaacctgttcttccgttgcgtccaccggaacggtgattttggcacggactttaccgttaacctgcaccacgaccagcgtggagtcttccaccatcgctttttcgtcagcaaccggccacggcgcgttgtcgatatcgccttcgcctttcagttcctgccacagcgtgaagcagatgtgcggggtgaacgggttaagcatacggacaacggccagcagtgcttcctgcatcagagcgcgatcctgctcgccatcggttggtgctttcgccagtttgttcatcagctccataatcgccgcaattgcggtgttgaaggtctgacgacggccgatatcatcggtcactttagcgatcgttttatgcacatcgcgacgcagcgctttctgattttcagtcagcgcatcaacgttcagtgccgcaacatcaccttttgctgtgtgctcgtaaaccagtttccagacacgtttcaggaagcggttagccccttccacaccggattcctgccattcgagagtcatatcagccggagaagcaaacatcataaacagacgaacggtgtccgcgccgtaacgttcaaccatcacctgcgggtcgataccgttgttcttgctcttggacattttgctcatgccggtataaaccagttcatggcctgccgcatctttcgctttcacgatacggcctttctcgtcacgttcaacgatagcatcaaccggggaaacccagttacgttcgccgttttcgccaacatagtagaaggcatctgccagcaccataccctgacacagcaactgtttcgctggttcgtcagagttcaccatgcctgcatcacgcatcagtttgtggaagaagcggaagtagagcaggtgcataatggcgtgttcaataccaccaatgtagatatccaccggcagccagtagttagccgcttcggaatccagcataccttctttgtactgcgggcaagtgtagcgcgcatagtaccaggaggactccataaaggtgtcgaaagtgtcggtttcacgcagtgctggcataccgttaacggtagttttcgcccactccggatctgctttaatcgggctggtaatgccgtccattaccacatcttccggcaggatcaccggcagctggtcgtccggggtcggcattacggtaccgtcttccagcgtcaccatcggaatcggcgcgccccagtaacgctgacgggaaacaccccagtcgcgcaggcggtagttcactttacgctcgccaacgcccatcgcagtcagtttatcggcgatggcgttgaaggccgcttcatggtcaagaccgttgaactcgccagagttgaacagcacgcctttttcagtcagggcttgctgagaaagatctggctcagagccgtcagctgccaggataaccggtttgatgttcaggccgtatttagaggcaaactcgtagtcgcgctggtcgtgccccggtaccgccataactgcgcccgtgccgtactccatcaatacgaagtttgctgcccaaacgggaatttcttcgcccgttaatgggtgaaccgctttaaagccagtatcgacgccttttttctccatcgtcgccatttcagcttcggcaactttggtgttacggcattcgtcaataaaggccgccagttcaggattattttccgccgctttctgcgccagcggatgacccgcagctaccgccaggtaggtacaacccataaaggtgtccgggcgggtagtgtaaacggtcagcgtgttgtcatagtcgttaacgttgaaggtgatctccacgccttcggaacgaccgatccagttacgctgcatggttttaacggtgtctggccagtgatccagtttatccagatcgttgagcagctcgtcagcgtaagcagtgattttgataaaccactgcgggatctctttacgttcaactttggtatcgcagcgccagcagcagccgtcgataacttgttcgttcgccagtacggtctggtcgttcgggcaccagttgaccgcagaagtcttcttatataccaggccttttttatacagctcggtgaagaatttctgttcccaacggtagtattccggcgtacaggttgccagctcgcggctccagtcataaccaaagcccagcattttgagctggtttttcatatacgcgatgttgtcgtacgtccacggtgccggagcggtgttgtttttcaccgccgcgccttccgcaggcagaccaaacgcgtcccagccgatcggctgcaggacgtttttgcccagcatacgctggtagcgggcgatcacgtcaccgatggtgtagttacgtacgtggcccatgtgtagtcgaccagaaggatagggaagcatagacaggcagtaatacttctctttgctctcgtcttcggttacttcaaatgtgcgcttctcatcccaatgaagctgtactttggattctatctcttccgggcggtattgctcttgcatggcagccagtggtcctgttttcaatacggctacaaatgtagcgttgaggtggtttttcagatccgcatagcatagcccaaacgtccgcgtcaaaacagcctttcgcgcactcgacgttgaaatgatgcccggattattcatacattaatttacagagtttgtgggcgtattagcaaagcaaggaacaaagaacgtctattattatagtcagttaacgacccgggagatgaaacgatgaacaaggttgctcaatattaccgtgaactggttgcgagtctgagcgaacgcctgcgcaatggcgaacgtgatatcgacgcactggtggaacaggcgcgcgagcgcgtaataaaaacaggggagttaacgcgaaccgaggtcgatgagctgacgcgagctgtcagacgtgacctggaagagttcgccatgagctatgaagagagcctgaaagaagaatctgacagcgtctttatgcgggtgattaaagaaagcttgtggcaggagctggcagacatcaccgataaaacgcagcttgaatggcgcgaagttttccaggacctcaatcatcatggggtttatcacagcggagaagtggtcgggctgggaaatctggtctgcgagaaatgtcacttccatctcccgatctacacaccggaagtgctgacgctatgcccgaaatgtggtcatgaccagttccagagacgcccgtttgagccgtaatagtctgatttcgcacagcaataaagagaatatgggccgaatgaaattccccggcccttgtttttatctttacagtaaatcttcagtctcacgaatttcctgactgacatctctggttccggaactctgaactttacgatacaggtcgagagcctgtcggagatcgacaggtcttccttctccgtagtgatacataatggccaggttataccaggcagtggcgtcattgcattcagcggctttcgtaaaccattcaaaggcagcctgataatctttctcaacgccttgtccgtgtttatacatataaccgatgttgacgtaagcgccgacgctcccctgagcggcagccttcagataccagtacatcgcttgcttatagtcctggtccaccccttcgccagcgttataatcccatgcaatttgaaactgggcgtgccgattaccctgctgtgcgcttttcaaataccagaatgcggcgagtgtcttgttttgagcaacgccttttccgtcttcataaagatcggccagattgttttgcgcgtcactatggccttgtaatgcagcttgtttgtaccagaaaaatgccagcgcatagtcttttgcgactccgttgccatttctgtacatccacccaagattattttgcgcataagacattccgctctccgcggctatctgataccagacaaccgcttctttataattgggggcttctccacgatccagtgtccagccaagggcgttggaagcgaaagtatggccttgtagggcagcttttttcagccagaagatggcttgctcattatctttatgacggcttttatcctcggtatacttttgccctaaggaatactgtgcttcacaatgaccttgctcagcggccagcttcagccagtaaaaggctttttcgtcgtccggagaatcaattgcgctatcgcgattataataaaacccaacaatatattgagcctcgcaatcgcctttttcagcacgttcgataatctcatctatacttaaattatcgcagcaactactcgtgaaaatcattatcatttccttatggttgcagataaaacatattatatttttatgtgttccatttttgcgtaagccttattttatgcgtattatgtcgcgtcagaaaagtataaataaacgagcctcgcaatgcggctaatattcatttaatgaatatttaaggataaattatatggacatggagagccaaaaaatattgtttgcactttccactccgatggaaatacgcaatgaatgctgtttacctagccatagtagtcccaaaatgtatttaggtacatgcttttttgacctttcttccagttggggaattgatgaccgtgatgacctgctgcgcacaattcaccgaatgatcgataacggtcatgccgctcggttggcagggttttatcaccgctggtttcgttatagcccatgtgaatggcgtgactatcttgctgaactaaatgagcaaggtcaggcttatgcgcaatttgtcgccagcaccgccgaatgctgtggcgaagggggaatcaaagcctgggattatgtccggatgggttttttaagccgaatgggcgtacttaataactggttgagcgaagaagaaagtctatggatccagagccgcattcatctacgggctctacgttattatagtaactggcggcaatactttgccggttatacctttggtcggcaatattggcagtctcccgaagatgatcatctgcctttattacgcgaattcttagcgcgtaaagaatacgacgattccggcaatgatatgttttatcaattatttgccagtgatgatgcgtattaccctaccttgtcctggcaaccattggcttactattctgcatgcccggaaacgcttaaggatatgagcgacctatgaaaaattgctggaagatcctcgatatagaggaaacgactgacgtcgatattatccgccgcgcttatctggcgctgttaccgtcctttcatccagaaaccgatccgcagggttttaaacaacttcgtcaggcgtatgaggaggcgctacggattgcgcagagccctgctaaatctgtttggcaaccagaagaatatgaggtagcagaacatgaaattctgctcgcctttcgtgcgttacttgcctctgatagtgaacgttttctgccctccgcctggcagcgattcattcagcaattaaattattgcagcatggaggagattgatgaattacgctggagcctgtgcacaatcgccatgaacactgcccatttatccttcgagtgcgtggtgttattagcagaaagattgcggtggttacaggaggaaaataccggggaaatagacgaagaagaactggaatcctttttatatgccattgcgaaggggaatgtttttaacttccagaccattctgcatctgcccgttgccgtgcaaaatgacaccatcgatttttaccaaatgttcgctcggatttggagtagccatccacaatggctgacattgtatttagcgcaacatcgcgcagtgattatccccgatgatgcaaaactgcacagaaatttactccgctggtatagcgcaggtcgcctggatatccccgaacttctggattacgcccagagttggcgggaaactgaacctgataatgaagatgcgccttattatgaatacgcgcaacgcgtctattgtggagaaggcgaaagcctgttggcagaactttgtgactactggcgcgagtatccctccacccaggcggatgctttaatgttgcaatggtgccgtcagcatcgggtcgattattacccattactggtgatgatgattgaagcgcgtgatctggttaacgatcagggaaaaccgctactttatgtccccggcgacagcgcccgtacgcgttttcatttatacgaaatactcagcgatgaaaaactctctgcgctggggcgtagtctggtcgagatggttttgcacaaaggacgtaagccgcggatcagtctcacgcgtgatacagaacataccttatggccattatatctagttgccaaacaattagtgcaggcctgccaacctacagaagaaagtttaatgccgattgtgagccgccttgatgcagaaaatcgttgtccactggaagcattaattattcgtcgattattaattcaggcggcgaattttaccgagaagcaaactgttgaaccggagccgcaaccgcagccaatgcccgttgacgatggtgggccaggctgtctgggcatcattaaaattattttctatatttttatctttgctggtttgatagggaaaatactccatctgttcgggtgacagtcgacgttaatgtgcgggaagcccggcaagtaatctttccgcatttttgtaatgttgtttggcggtcagttttaaccatttttgagattcataatggttaacattaataccactgccatttctgtagatcaaacctaaagtatattgagcatgagcatacccttgttcagctgcttccttataccagagaattgctttacgggtgtcgggtttgacccccagacctttgaggtagatccaccccagtttactttgcgcgcgtggattttcctgttccgcactttgctcataccagtatctcgcctgtgtataatccagtggtttaccgtcgctaccatgaagataaaattctccaaggcgatattggctcgtactgtgaccatgaatcgcggaaagctccgtggctgccgtggtgaatggaagactgcccggactgcttaaataatcaaaggcataattcaccatggctttatcacgcaacgtcgttttcttgggttggctaatacaggtaattgctgcaactataaaaattgcgaatatatacattaattttttattcatgtgtgaatgcttcgattttctttttattttgaaagcgtcaagtttatactcatcaataataaaaaagtagtcagttaatgcacttaagggattattaacaaatgaataaggaagaacaatatcttctttttgcgctttctgcgcccatggaaatacttaatcagggttgcaaacccgcgcatgacagcccaaaaatgtatactgggataaaagaattcgagctcagtagttcctggggaataaataatcgtgatgatttaattcagactatttatcagatgactgatgatggtcatgccaatgatttagctggcttatatctgacatggcatcgctcttcccctgaagagtggaaagcattaattgctggtggcagcgagagagggttgatttatacccaattcgttgcccaaaccgctatgtgctgtggggaagggggaatcaaagcctgggattatgttcgaatggggtttctgagtcgggtcggtgtgctcaacaagtggctgacggaagaagagagtttatggctgcaaagccgcgtctatgtacgagctcaccattactatcacagctggatgcactatttttccgcctatagcttaggacgtctctactggcaatcttctcagtgcgaagacaacactagcctacgcgaggcgctaaccctgtacaaatacgatagcgccgggagtcgtatgttcgaagagctggcagcgggaagcgatcgtttctatgccacgcttccctggcagccattaactgtccagtctgaatgcccggtaacgcttaaggatgtgagcgacctatgaaaacatgttggcaaatcctcgaaattgaaagcacgacgcaaatagacattatccgccaggcttatcttgctcgcttaccgttgtgtcatcccgaaaccgatccgcaagggtttaaagcattacgccaggcctatgaagaggccctgcgactggcggtaaatcctgtcgaggaagcagatgatgaagaaaaagatgctgccgctgaacatgaaatactacgtgcattcaggacattactggatagtgaaagtgatcgttttcagccttccgcctggcagaaatttattcagcaattaaatacctggaacatggaggatgtcgatcaattacgctggccgctgtgtgcaatcgccatagaagcgcgatatcttagtttaaattgtgcttctttgctggcagagcgtttgaactggcatagttttaatgacagcgaaggaatggatgaggaagaaagggaggcttttcttgaggccattcaggctggtgattgtttcgatttccttagccttctggaatatcccattgcgttgcagaaccagactgttgagtattacttcgcgctggaacgttgctgccgttaccatcctgactatgtcactgcgtttttggcgatggaaggtccgtggttaattcctgatgatgcaaagttacatcgcaaactgttgcgctggtacagcagcgtgcaaacaggtatggcggaactcattcctgtcgctcaacagtggcaaacggaagaaccagaaagcgaagatgcccggtattacttgtgtgcacaacgtttgtactgcggcgagggggaaagcctgcttgccgatctctgcgcgtactgggaaagttacccatctacacaagctgataatttgttgttgcagtggagcaagcgtcattgcccggattatttcgcgttattagtgatggttatcgaagcgcggagcatggtagatgcgcaaggtcaaccgctgaaatatgttcctggtgagagcgcccggacgcggctgttatgggcggagattttacatagcggaaaattaagcccgttaggtcaaagctttattgagagcttattcttcaagcgcaaagcatgggcgtggtggaaaagcagagtcggtagcgagacagagcaagatagtccgttcctggatttgtatcgggtagcggaacaggtagtacttgaagcgtttccgaaacaagagatgctggcccgtcttaatacaaggctggaaggcggagatgctcatccattagaggccattgtcacccggatgcttttgacgaaagtgaaactcgagccggaggatgaagatgtcgatgagccaacacctgaaaatcatgaagaaaaaaatgatgagggtgaaaaaccacagagcattaccagcattatcaaaatcagtttaacggtgctggtgataggttatgctctcggcaaaatcgcgatgttgtttagctgacgatgtgttttttgcgccgatgccggatgcagcgtttacgccgcatccggcagccgtgtttatgggatctcaatggctaaataatcgctcgcccgccgccgaacttcatccacgcgggccatatcgttactctgcaacgccgcatcaaaatcggtgatcacccggccgatctcttctcgctcgtcacccagcgcccgcgcccacaactcttccagtttggctttaaaggtgcgattgatgagcatatcgcgcggataaattttcaatgcggataaccgcgtccgactctcttcaatctgctgcgcgctcaatgttaccgggctgtggttaatcactctggacttaacgctgccgtcttccagaagcacgtcaacttcaagcaacccgttgatatcataactaaagcgaatatcaatgctctgataagccccggttttcttcaacggcacatcgaaggattccaccagaatgttgtttttaactttgtggttttctccctgatagacgttaaccgtaatactatcctgttccgggtgcatggtactataagtttctacacggctcacgggcacagtggtgtttcgttcaataatcgggctgaaaatgccggaaacgccctggcggttaacttcaacgcccaagctgtaagggcaaatatcagtgaggattacctcttcaatatcttcactgcgtaagcggcaggcggcctggattgctgcgcccagcgcgacaatggtgctcggatcgtaactttgatacggtaatttgccaaacagacgcacggcgattcgctgcaccagcggcatttgactcgcgccgccaaccagcaccagactgtcgatttgactcggcttcagacgcgcatcgcgcaacgcctgttcaatcggcactcgcaagcgattgagcagcggcaaccacaaatcttccagttcgttctcgtaaaattcgcattcccgcgtttcttcctgatactgccagcgaatgtgcaatgggctttgattgctacattttgccgcttccacacaggcgtacaaggctgccagttcactctcgttaagcgtggtcctggcgacatccgcgcgttttaaaacctcatcgaccagcatatgggtaaaatcttcgccaccaagaaagttgtcgccagcggaggcgtgaacttcaatcaccggcgtggcgtactcaagcaccgtaacgtcaaacgtgccgccaccgagatcaaacaccaggctacgggtattttgttgggtatgcaggccatacgccatcgcagctgctgtgggttcattaattaagcgtaccgcatttaacccggctaactccgctgctaaacgggtatgcttgcgttgttcatcgctgaaataagccggaacggagatcaccacatctttaatcggacgttgcagaaattcttcggcatcttcttttaaactgcgtaataccaaagaggacagttctggcgcgttaaatgtgtcgctgcctaaccgccagttggtattactgcccattgcacgtttaaataacgctgccgttttatccggatggctagtacgccgacttacagccggttttccgactaaaatatgattattttcatccatgctaattatggatggtgttaaatattcaccgaacttatttggaattaattgcgcggcaccgtctttccagacggcaattaaactattggtagtaccgagatcgataccaatggcgagttctgcattatccattgcatttatatcttgaaagaaaaagagataaacagattaagaccacccaggtaacgcgtggtgatcttaatcaatgacgtgtgttaagcgtaaaatttcagacgatcagccagtaaatcaacaaagccctgacgatcaacatcgaccattacggtggcattcggtttattgcctgtcagataataataatcaacaaccgtcataccctgggtatatttcccctgtgtttccacgccaacccagcgctcaacagaggtaaataactccggtttcaacagccaggcgatggtgcatgggtcatgcagtggtgcgccgacaaagccccatttttcgtctttatgatattcgaggaagaaatccagcagttcggcaacaatggtactaacagggttaccaatcgcgcggaaacgctcggtgtcttcaacgtggatttgtgctttatgagtaacatccagaccggccatcaccaccgggatcccactctggaagacaatttctgccgcttccgggtcaacgtaaatattaaattcagccgcaggcgtccagttacccagccccatagcgccacccataatcacgatacgggcaattttgctatgcagttccggatggctattgagcagcaaggcaacgttagtttgcggtccggtagacacaatggtgacaggttccgcactttcacgcagcgttttcgccatcagctctaccgccgtacagttttgcggtgcgaatgtcggttccggtaatgccgggccgtcgagaccgctttcgccgtgcacattgtccgcgataatcaactcacgcattaacggttttaccgcgccgcctgctaccggaatatcggtgcgattaagcaaggtcagcatacgcagaacattgcgtaaggttttttctggtgtctggtttccggcggaagacgtaattgctttgacatcaagctctggactggcgagggcgagaactattgcgatagcgtcgtcatgacctgggtcgcaatctaacagaattggcagtgccattgttgctccttgttgtgtgcttctttgcgacaagggtaacgccaggatgtaacagatacgaggggcgaaacgataaagcgtgagatggcgcgcaattgggtatgcgcgccagagtgattaatgcaggattttcgcgaggaagtcttttgcgcggtcgcttttcggatcatcgaagaaagcgtctttcgggctgtcttcgacaattttaccctcgtccataaagatcacccgattcgccactttacgggcaaagcccatttcgtgggtcaccaccatcatggtcattccttcgttcgccagttccaccatcacgtccagtacttcgttgatcatctccggatccagcgcgcttgtcggttcgtcaaacagcatcgcaataggatccatacacaacgcgcgagcgattgccacacgctgctgctgaccgccggaaagctgcgccggaaacttattggcgtgagcagaaagcccgacacgctccagcagtttcagggctttttcacgagccggcgctttatcgcgtttaagcactttcacctgcgccagggtcaggttttcgataatgctcagatgagggaacagctcgaaatgctggaataccatcccgacgcgggaacgcagctttgccagatcggttttcttgtcgttaaccacgataccatcgacggtgatttcaccttgctgcaccggttcgaggccgttgacggttttaatcagcgtacttttgccggaaccagacgggccgcaaaccaccaccacttcgccttttttcacttcggtactgcagtcggtcagcacctgaaagtgaccataccatttactaacatttttcagggtaatcattatgctgtccttcttttcaagtagctgaccaacaagctcgcgctaagactaataacgaaataaacaaatccggcaaacaggatcatctcaacctgcgtaccatcacgctcaccaatggtactggcggtacggaagaaatcggccagggataacacatacaccagactggtatcctggaacagtacgatgccctgagtgagcagcagcggcaccatcgcgcggaacgcctgcggcagaataatcagtttcatgctctgccagtgagtcattcccaacgccagcgcggcgctgctttgaccacgagaaatactttgaataccagcacggataatctcactatagtaggccgcttcaaacatgctaaacgccaccatcgcgctaattaaacggatatcattttttgggcttaatcccagcacgttttgcagaaaacccggcacgatcaggtaaaaccacagcaaaaccataactaaaggaatgctgcggaatacgttaacgtaggctttggcaaaccacgccacgggcgcaaagctggataaacgcatcaccgccagcatcgtgccccacaaaataccaatcactaccgccgtgacggtgattttcagggtgatcaccagcccgtcgagcagatatggcagggaagggacaatggaactccagtcaaactcgtacattatttgccccccatgttgccaggcaggcgaactttacgttcaaccagcgtcatcaccagcatgataaaagcgttaatcaacacatacgccagcgtaatggcggtaaagctctcccaggcatgggcactgtaatcgagcaatttacccgcctgcgccgccatatccaccagaccgatagtgctggcgatggcggagtttttcaccaggttcatcatctcactggtcatcggcgggacgataacgcgataagcattaggcagcagtacgtatcgataagcctgcggtagcgtcaggcccatcgccagcgcggcatttttttgccctcgcggcaggctctgaatcgcggcgcgtacctgttcgcaaacacgggcggcggtaaacagccccaggcagagcatggaactaaggaaaaactgaatattgggatccagctcggccttaaaccacatgccgattttctccggcagcagctccgggatcaccagataccaggtaaagaattgcacaatcaacggcacgttgcggaacagttcgacatacaacgtacccagaccagagagaaaacggtttggaacggtacgtaaaatgccgaaaaaactaccgacgaggaaagcgataatccaggcgcagatgctcaaagcgatcgtcacctgaaaaccactccagatccaaccaagataggtggtgttgccgaacggggcttgttgtaaaaaaataccccagttccagtctatagacataaatctactccagaaaaaagagggtagcagcgttaactgctaccctcgaagattgttacccagcgtattgcggttttcaggcccgatggggaacgaccatcaggcgtatagtctgtccgtgctacgtaacaatcgagagggctggaatttccgcccctggttcttgtaattagttcagtgccttgtcattcggttctttgaacagtgctttcatttcgtcactcagttcgaaattcatgttcaggtttttcggcggaattggatttttgaaccacttatcaaaccatttttccgcttcaccggaggtctgcacctgagcgatggtgtcatccatcagctttttgaactgcggatcatctttacgcaacatacaaccgtaggcctcctgagactgcggcttgccgacgatttcccagttgtctggtttcttcgctttcgcacgttcaccggccagcagagcgtcatccatcataaaggcaacggcacgaccgctttccagggtgcggaaagagtcaccgtgatctttggcgctgatgatgcgcatattcattttttgctcttcattcagtttgttgagcaaaacttcagaggtagtgccggaagtgacgactacggctttgtctttcaggttggcaaaatctttgatatcgccaccctttttggtcaacaggcgcgtaccgaccacgaaaatagtgtcagagaaagccgcctgtttttggcgttcgacgttgttggtggtagaaccacattcaaaatcgaaagtgccgttttgcagcagtggaatacggttttgactggtaatcggaatcagttttacctgcaagtccggtttgttgagtttctttttcactgcttcaacaatggcgttggagtaatcctggctgtaacccaccactttttgctgattgtcgtaataagagaaaggcacactagattcacggtgaccgacgacaatcacaccgtttttggcgattttgtccagagtactgcccgctgccggggcggcgtcatctgcctgtgccagtcctgcggaaagcgccagggcgaggattgctgtggcaggtttacgtaattgcatatccaactcctttatcttctgcgttaagaacgcatggatacccgttgtgagtgtttgtgttgttatcgtctgcaactttattgtgcagtgttgtgcctgttagggaaggtgccttaggtaacatttagtttggctaaatgtaaagatattgctgttttattgtttgtttttgcgagatgcgccgcaccattccgaagcaaaattcttaaaatgcactcttttagtgctaccgctggattactgtggtgcaactaggttgtactgatgctgtttcagggtttgccttgtataacaaagcaatagatgtgccaaagttggataggagaatattgttatccggataatgcactgatgccgcatccggtgagcgtgccgaaatatgggatgtattccggcacgataagaagggattatttacgtcgctgacgcagactcatcaacacagcagcaaaaccaaacaatgccgtcagcacccacagcggccagttgccggtacgtgcgtatggtgtgagtccggtggtcggcgtcacgttagtggttaacacctcgcgggtgaactgcgggatcatcgcctgaatctcaccctgcgggccaatcaccgccgtaatgccgttgttggtgctgcgcaacagtgggcgcgccagctccagcgcacgcattcgcgccatctggaagtgttgccatggaccaatagatttaccaaaccacgcatcgttggagatagtcagcagatagtcggtatccgggcggaagttatcgcgcacttgctcgccgagaatgatctcgtagcaaatagccgcagtaagctcaataccatttgcgctcagcggcggctggatatatggcccacggctgaagctgctcatcggcagatcaaagaacggtgctaacggacgcagaatgctctccagcgggacaaactcgccaaacggcaccagatggtttttgttatagcgatcggcactttcgtagctgtacggcgcacctttacccagcgtgatgatggtgttgtaggtatcgtagcggttctgcttattgagacgcgcgtcgacaatcccggttaccaggctgctacctttatcacgcaactcaccgtccagtgctttgaggaacggttgctgattaatttccagatcggttatcgcgctctccggccagataatcaagctacttttgcccatcagcggtgccgttgcgttgtagtaaatcttcagcgtattaagaagctggccttcgtcccatttcaggctttgcggaatatcgccctgaaccatgctaacctgaatggttttctccggttgtggggtaaaccactggatgtaacgcagcgggaagggaagggcaaacagcacgacggccaccaccagcggacgccagttgcgtttgaccaacgccagtgccagcaggccactaaccatcatcagcaggaagttaatggcttccacgcccattatcggtgccagcccttttaacgggccatcaatctggctatagccgaactgtaaccacgggaagccggtcagtacccaaccgcgcagaaactcggtcacttgccagagggcaggggcggcaatcgctacgcgcagccaggtggttttcggccacagacggctcagcacgccagcaaacagtccggtatacaggctcaaatacgccgccagcagcaccaccaggaagatgttaaccgggccaggcattccgccaaaggtcgcgatgctgacatagacccagttaataccgctgccaaagaggccaaatccccagcaaaagccaatagcggcagactggagtggacggcggttaaaggtcaacgcctgaagccccatcaggctaataatcgccgcaggccagacgtcgtaaggagagaaggccagcgttccgcaggcaccgaataataacgccagcagcaggcgaatgcgctggcgttcaattaaactggcaaaagccatgtagttatctatccagtttcggttttattcatccagcttcggctggggactgtcatccgggattttgacatgaacctgaataatacgccgactgtcggccatcgccactttgaactggtaaccgtcgatgtcgatagtttcgccacgcgccggaagatgcccaaatgcctgcatcaccagaccaccgatagtgtcgacttcttcatcgctaaagtgggtgccgaacgcttcgttgaagtcttcaatggaagccagtgcgcgtacggtccaggtatgacgactcagctgacggaagtcgatatcatcttcttcgtcatactcgtcttcaatctcaccaacaatcagttccaggatgtcttcaatggtcaccagaccggaaaccccaccgaattcgtcaataacgatcgccatgtggtaacgctgagagcgaaactctttcagcatccggtctacgcgcttactttcaggaacgacaaccgcctgacgtaacactttgtccatgctgaaggcttcagcatcgctgcgcataaacggcagcaagtctttcgccatcagaatcccttcaatgtgatctttgtcttcgctaatcaccgggaaacgactgtgggcggactcgatgatgacatcaagacattcgtccagcgtctggttgcgtttcagggtaatcatctgggagcgggggatcatgatgtcgcgaacgcgttggtctgcgatgtccatcaccccttcgagcatatcgcgcgtatcttcgtcgataaggtcgttctgcccggaatcacggatcagcgccagcagttcgtcacggtttttcggttcaccgtggaaaagttggctgagtaacagggagaaaaatcccttcttgttgcttatcgtgtcactactgtgactattgtcgtcgctcatggcgtcgtatgggttctcatgttagttaatcaaaacgccgtcgttaatcaccaacggcggggacgtctgccagtcaaatgcctggcaaattattctttctcggcaatgtacggatcctcatagcccagagcaagcataatctctgtttcgagggcttccatttcttctgcttcgtcatcttcgatgtgatcgtaacctaacaaatgcagactgccgtgcaccaccatatgcgcccagtgcgcctccagtggtttgccttgctcctgagcttccttctcaaccacctgacggcagataaccagatcgcccagtaggctcatttccatgccaggcggcacttcaaacgggaaggagagcacgttggtcggcttatccttaccgcgataggtcagattcagactgtggctttcggcggtatcgaccacgcgaatcgtcacttcgctttcttcctgaaactgcgggatcaccgcattcagccatgtctgaaactggctctcttccggtaacccggaattatcttcacatgccagttgtaaatcgaggatcacctgactcatttttgttcctgttcttcgcgcttgcgttctgctgccagcgccgcttttcgtttttgttcggcttcttcccaggcttcataggcgttaacgatacgcgccaccacagggtgacgaaccacgtcttcgctgtggaagaagttaaagctgatctcttcgacatcggccagcacttcgatggcgtgacgtaagccacttttagtattacgcggcaggtcgatctgtgtgacgtcgccggtgataaccgctttactgttaaaaccgatacgggtcaggaacatcttcatctgttcgatggtggtgttctggctctcatcgagaatgataaacgcgtcgttcagcgtacgaccacgcatataggccagcggtgcgacttcaataacgttgcgctcaatcagtttctcgactttctcaaagcccagcatttcaaacagcgcgtcgtacagcgggcgcagatacgggtctactttctggcttaaatcgccaggcaggaagcccagtttctcaccggcttctactgccggacgagtcagcagaatacggcgaatttcctgacgctccagggcatcaactgccgcagccactgccaggtaggttttacccgtacccgccgggccaacgccgaaggtaatgtcatggtcgagaatattggcgatgtactgcgcctggtttggcgtgcgcggcttaattacgccgcgtttggttttgatattgaccgctttgccgtactccggcacgctctccgcgctttgctccagtacccgcgcttctttaatcgcaaggtggatctgttccggttcgatatcctgaatctgaccgcgcatcggggcagtatcgacatacaggctacgcagaatgtctgccgcagcggtgacgcaaatcggacggccggtcagtttaaagtggttatcgcggcgattgatctcgatgccgagacggcgttcgagctgcttgatgttgtcatcaaacgggccgcacaggctcaacagacgcgcattgtctgctggctccagggtgatttcgcgagtgtctatgttcaaaccgttcctcttatctgtatgccgccggaagctgaacattcaccggcctataaggaaattattcacgccacaggaaaaaggcgcaagcattgcaataaagatggggataaagagagaaaaaacaaggcccaccggaacggcaggcctgagaattacggctgataataacccacgccaaggtcgttttctttgcgggtacgggcaatcacactttccggtgtttctgccacgcgcagacccatttcatcttcagtacgcaccactttaccgcgcagagagttcgggtagacgtcggtaatttctacatcgacgaatttaccgatcatatccggcgtgccttcgaagttgaccacgcggttattttccgtacgcccggaaagctccatgatgctcttacggcttgtaccttctaccagaatacgctgggtggtgccgagcatccggcggctccacgccatcgcttgctgattaatgcgctcttgcagaatatacagacgctgcttcttctcttcttccggaacatcatcaaccatatcggcggctggtgtacccggacgtgcagagaagataaagctgtagctcatgtcgaaattgacgtcggcaatcagcttcatcgttttctcgaagtcttcggtggtttcgccagggaagccaacgatgaaatcagaactgatctgaatatctggacgcgccgcacgcagtttacggatgatcgctttgtactccagcgccgtatgggtacggcccatcaggttcagaatgcgatcggaaccgctctgtaccggcagatgcaggaagctcaccagctccggcgtgtcgcgatacacttcgatgatatcgtcggtgaattcgatcggatggctggtggtaaagcgaatacgatcgatcccgtcgatcgcagcaaccagacgcagcagatcggcaaagcttccggtggtgccgtcgtagttttcaccacgccaggcgttcacgttctgaccgagcaggttgacttcacgcacgccctgagccgcaagctgggcaatctcaaacagaatatcgtcggacggacggcttacctcttcaccacgggtgtaaggcaccacgcagtaggtgcaatatttattgcagccttccatgatggagacaaacgcggtcggcccttcggcgcgcggttccggtagacggtcaaacttctcgatttccgggaagctgatatctacaaccgggctgcggtcgccacgcacggagttgatcatctccggcagacggtgcagcgtttgcggcccaaaaataatatcgacatagtgggcgcgctggcgaatgtgctcgccttcttggcttgccacgcagccaccgacgccgataatcaggtctggattcttctcttttaacagtttccagcgacccaactgatggaagactttttcctgagccttctcgcggatactgcaggtgttcagcagcagcacatccgcttcttccgccacgtcggtcagttgatagccgtgggtggcatccagcagatcggccatcttgctactatcgtactcgttcatctgacagccccaggttttaatatggagttttttggtcatcgacttgctcttgcgaaatagtagccaggaatgcagggcgcatagtgtaatgctttgctgccgttgtgaccagtatgagcgttatcagcccttaggggtaaaaatcctgtaaacttaaagcatattgctaacaggatgattgaccatgacaaatcaaccaacggaaattgccattgtcggcggaggaatggtcggcggcgcactggcgctggggctggcacagcacggatttgcggtaacggtgatcgagcacgcagaaccagcgccgtttgtcgctgatagccaaccggacgtgcggatcagcgcgatcagcgcggctagcgtaagtttgcttaaagggttaggggtctgggatgcagtacaggctatgcgttgccatccttaccgcagactggaaacgtgggagtgggaaacggcgcatgtggtgtttgacgccgctgaacttaagctaccgctgcttggctatatggtggaaaacactgtcctgcaacaggcgttgtggcaggcgctggaagcgcatccgaaagtaacgttacgtgtgccaggcagcctgattgcgctgcatcgccatgatgatcttcaggagctggagctgaaaggcggtgaagtgattcgcgcgaagctggtgattggtgccgacggcgcaaatagccaggtgcggcagatggcgggaattggcgttcatgcatggcagtatgcgcagagctgcatgttgattagcgtccagtgcgagaacgatcccggcgacagcacctggcagcaatttactccggacggaccgcgtgcgtttctgccgttgtttgataactgggcaagcctggtgtggtatgactctccggcgcgtattcgccagttgcagaatatgaatatggcacagctccaggcggaaatcgcgaagcatttcccgagccgtctgggttacgttacaccgcttgccgctggtgcgtttccgctgacgcgtcgccatgcgttgcagtacgtgcagccagggcttgcgctggtgggcgatgccgcgcataccatccatccgctggcggggcagggagtgaatcttggttatcgtgatgtcgatgccctgattgatgttctggtcaacgcccgcagctacggcgaagcgtgggccagttatcctgtcctcaagcgttaccagatgcggcgcatggcggataacttcattatgcaaagcggtatggatctgttttatgccggattcagcaataatctgccaccactgcgttttatgcgtaatctcgggttaatggcggcggagcgtgctggcgtgttgaaacgtcaggcgctgaaatatgcgttagggttgtaaccttacaacattgccggatgcgtgccaaccgtaggtcggataagacgcggcagcgtcgcatccgacattgaaggataagacgtgtcaacatcgcattcgacattgaatgaacgcagaaaagcaaaaagctcgccgaagcgagcttttttaatgtggctggggtacgaggattcgaacctcggaatgccggaatcagaatccggtgccttaccgcttggcgataccccaactgggtgcacttacaaggtaagcgtcttgaataaattggctggggtacgaggattcgaacctcggaatgccggaatcagaatccggtgccttaccgcttggcgataccccaacaaattggttttgaatttgccgaacatattcgatacattcagaatttggtggctacgacgggattcgaacctgtgaccccatcattatgagtgatgtgctctaaccaactgagctacgtagccagattgtttcttcgatggctggggtacctggattcgaaccagggaatgccggtatcaaaaaccggtgccttaccgcttggcgataccccaataaccgggcggtgaaccgcttactcgaagaagatggctggggtacctggattcgaaccagggaatgccggtatcaaaaaccggtgccttaccgcttggcgataccccatccgtacaacgctttctggtgaatggtgcgggaggcgagacttgaactcgcacaccttgcggcgccagaacctaaatctggtgcgtctaccaatttcgccactcccgcaaaaaaagatggtggctacgacgggattcgaacctgtgaccccatcattatgagtgatgtgctctaaccaactgagctacgtagccatcttttttttcgcgataccttatcggcgttgcggggcgcattatgcgtatagagccttgcagcgtcaacctctttttcaaggaaaattgctcgaaagtgactgtttggttaggttgcgaacagcgtggcgctatattcgtcaattattgtttactttgtgttttttcccaccctacagccattcttttgtcatacaggatgaaattcggaatttaacaatagtggtgggaaattaatctatgaaatactggcctacagtgatgagttgtcaaacagtgatgtggcaaacccggaacatttccttactgcatatcagaatcaacaagcacctcaataactgaaacagccccggatttcaccggggctgtttcgcatttcttacttatacgcgctctggtgaacaccaaccgcgcgaccagacggatcgtccattttcttgaacgcttcatcccattcgatcgctttagcggaagaacaagcgacggaaggaccgcccggcacgcactcagcggcgctcggaagcgggaatagttcttcaaagatctcccgatacaagtacgcttctttagaggttggcgtgttgtacgggaagcggaagcgggcagtttccagttgctgatcagaaacctgctgcgcagccacttctttcagggtgtcgatccaactgtaaccgacgccatcggagaactgctctttctgccgccaggccacgcttgcaggcagatacgcttcaaaacattcacgcaggatgtgtttttccattttgccgttaccgcacattttatcctgtgggttaatacgcatcgccacatcaaggaattttttgtcgaggaacggaacgcgtgcttccacgccccaggcactcatcgctttgttggcacgcgcgcagtcatacatatgcagggccagcagtttacgcaccgtctcttcatgcagttctttggcattcggtgctttgtggaagtaaagataaccgccgaacacttcatcagaaccttcaccggacagcaccattttaatgcccatcgccttgatcttacggctcattaaatacatcggtgtactagcgcgaatagtggtcacatcataagtttcgatgtggtaaatcacgtcgcggatggcatccagaccttcctgtacagtgaagtgaatttcgtgatgcaccgtgcccagatggtttgccacttcctgggctgctttcagatccggactacccggcagacctacagcaaaggagtgtaactgcggccaccaggcttcagagcgttcctgatcttccacgcgacgggctgcgtatttcttggtgatagcggaaataatactggaatccagaccaccagaaagcagcacaccgtaaggcacatcagacatcagatggcttttaacactatcttccagtgcctgacgcagctcgtttttgtcggtcacgttatctttcaccgcatcgtagtcgaaccagtcgcgatgatagtaagaacggatttcgccgtcctggctccacaaatagctccccgccgggaactctttaatcgtgcggcaaactggcaccagcgctttcatttcactggccacatacagctgaccgtgttcgtcataccccatatacagtgggatgatccccagatggtcgcgaccaatcaggtaggcatctttttcgctgtcgtacagtgcaaaggcaaacatgccctgcaagtcgtcgagaaattccggccctttttcctgatacagcgcgaggatcacttcacagtcagacccggtctggaactggtaacgatcgccatattcggcgcgcaatgcctggtggttgtagatttcaccgtttaccgccagtacgtgggttttttgttggttgtagagaggttgcgcccccgcgttaacgtcaacaatactcagacgttcgtgggcgagaatggcgttatcgctggcataaataccggaccagtccgggccacgatgacgcatcaggcgactcagctcgagggctttcttacgcagctcaactgcgtctgttttgatatcgaatacgccaaaaatactacacataaccttctccgttaacctggtatttgttgcttgttgtgtttgcttgtttaaaaaaatgccgcaaagcagcactgtgcgcaagcgatttggcggtgaaaaaataaaaaacgtaatggtgattgtcgattggtgaaaaaaggtctggtgtgaggatatatttattgatgaatcgataatttttagcgggttttattgaatgtttatattttacgggggccaaattgctgacaaagtgcgatttgttcatgccggatgcggcgtgaacgccttatccggcctacaaaagcatgaaaattcaatatattgcaggagctgcgtaggcctgataagcgtagcgcatcaggcagtttggcgtttgtcatcagagccaaccacgtccgcagacgtggttgctattcagataacgtcgatttcagcgacactcgggtaaatccagctggggcggaaaggcatactgtcgatatcgtcgaggctgctaacaccagaaagcaccagaatcgtctccagacctgcctggaagccggccagaatatcggtacgcaggttatcgccgacaatcaccgtttcttcgctatgcgcctgcattttgtttaatgctgcgcggatgatccacgggctgggcttaccaacatagaacggtttgcgcccggagattttctcaatccctgcacacaacgcgccacaagcgggataaaaaccgcgcccgtgggtgtccggattggtggcgataaaacgtgcaccgttagcgacgaaataggctgctttatgcatcatgtcccagttgtaggaacgcgtttcgccaacaatcacgaaatcagggttcacatcggtaatagtgaaaccggctttgtacagttcatgaatcagtgcgccttcgcccaccacatacgctttcttgccttcctggcgacgcaggaaatcggcagtcgccatcgcagaggtataaaacacgctgtcaggtacatcgacacctgcggtggcaaagcggttcgccagatcttgcccagtctggctaggatagttggtcagcaacaccagcggcaggcctttatccataatcccgtgcaaaaattccgctgcacccggtacggcgacgttatcgtgcatcagcacgccgtcgatatcgcaaattacatttttaatggtcatggactacccagaatattgacaacaataagcgccactataaaagcacattaattttccagcaaatgctggagcaaaataccgttgagcatggcgcgttttaccagcgcaaaagcgccgattgcgctgcggtgatccagctcagaacgtaccaccggcagattagtgcgaaacgccttcagcgcctgggtattaatgcagctttcaatagcagggagcagcactttatcggcttcggtgatttcaccggcaataacaattttttgcggattaaataagttgatagcaatggcgatggttttacccagatgacgaccgacatactcaattacttcgctcgccagactatcgcctttgttcgcggctttgcagatagttttgatggtgcagtcgtccagcggcacgcggctctggtagccctgctttaacagattcaacacccgttgttcaatggcagcgttggcagcgatagtttccaggcagccaaagttgccgcagtggcagcgttcacccagcggttcgacctgaatatggccaatttcaccgacgttgccgttgcggccaataaaaatgcgcccgttagagataatcccggccccggttccgcgatggacacgcaccagaatggagtcttcgcaatcctgacttgcaccgaagtagtgctccgccagcgccagactacggatatcgtgaccaacgaaacaggtcactttaaaacgttcttccagagcttctaccagcccccagttttctacctgaatatgcggcatgtaatgaattttgccgctgtccgggtcaacaagccctggcaggatcacgctaatcgcgatcagctcgcgcagtttgcgctggtagctatcaataaactgagcaatggcattcaacagggcatgttccagcgtttgctgggtacgttccggcagcgggtaatgttcttctgccagcactttgctgctgagatcaaacagagtgatggtggcgtcatgacgaccaagccgtacgccgattgcgtggaaattgcgggtttcggtgacgatggagatagcgcggcggcccccggtggaggcctgctgatcaacttctttgatcagcccgcgttcgataagctgacgcgtaattttggttacgctggcgggggcaagctggctttgctcggcaatctgaatccggctgattggcccgtactggtcaatcaggcgataaaccgccgcgctgttaagctgttttacgagatcaacattacctatctgagcttgtccgcctggtgtcatactttctcttattgagttacgacctcgttaccgttaacgatggtcttggtgattttaaaatcaggtgtgaatgcagtcaggttggctactttacctgcggcgagtgtgccgagacgtttctcaacgccaatcgcacgcgccggatagagcgtcgccatacgtagcacttcatccagtgcgataccgcaatgttcgaccagattacgcacgccttcaatcatggttaaggaactaccgcttaacgtaccgttctcatccacacaaagtccgttacggtagtatattgttttacccgcaaaaatgaactgttcaatgttggcacctgctggcgcggtggcgtcagtaaccagacacagtttgtcgcctttcagacgtttagcgttgcgaatgttggcgtaatcaacatgcaggccatcagcaataataccgcaataaatgtcagcttcgtcgaggatcgcgcccgccaggccaggttcacgaccggtaatatacggcatcgcgttgtacagatgggtggcaaaggtaatccccgcgcggaaaccggcttttgcttctttcaacgtcgcgttggagtgaccggcagaaaccacaatcccggcatttgccagtttgctgatgacttccgcaggaaccatttccggtgccagggtcactttggtaatgacgtcggcgttttcacacaggaaatcgaccagcgcggcatcaggcttacgcacaaaattcggattatgggtgcctttttttaccagattcagccacggaccttccagatgcagacctaacgcctgattcggatgttttgccaggtactcgcgcataacgcgcacgccctgtttcatcagctcatcgctggtggtgataagcgtcggcagatagttagtacagccacttttctcattggctttctgcatgatttccagcgtttccacgctgaccgcttcagcggtgtcgttaaactgtacgccgccgcagccgtttaactgcacatcgataaaaccgggggagagaatggccccgttcagactacgttgttcgatctctggcggcagttccgctaccggacagacgcttttaatcaggccatcagcgataacaaccgcgtggtcatcaagaaattcgtggccggtaaagatccggccctgggttaatgcatacattctgacccccgattttaaaaaatattgccctgagcaaggagccagggcagggataacaattacagacctttgatattttctgcttctaattcattgaaatatcttaaagtcttaactttcagctccatggtggaaggttcatcgcacaccatgatcgctttcggatgcagttgcagacagctgatggtccacatatggttcacgcaaccttcaacggcggcctgcagcgccagtgctttctggctacccagcaccagaatcatcacttcttcggcatccagcagtgtaccaacaccgacagtcagggcatattttggcacctgattaacatcgttatcaaagaaacgagagtttgcgacgcgagtgtcatgagtcagggttttgatacgagtacgagaagccagagaagacgccggttcgttaaatgcaatatgaccgtcgttacctacaccgcccataaacagatgaatttttccgtaagaacggattttttcttcatactggcggcactcggcgtcgatatccggggcgttgccgttgagaaggttgatgttttctgctggaatatcaacgtgatcgaagaaattacggtgcataaagctgtagtagctttccggatgctctttcggcagaccgacatattcgtccatgttgaaggtgacaacgtgcttaaagctgacctggcctgctttatgcatttcgactaacgctttataggtggtcatcggcgtgccgccagtcggcaggcccagtacaaacggacgatcggcagtcggtttgaacgcattgatacgattgacgatatggcgagcagcccatttgccgacctgttcagcggtagtcagggggatcagtctcattattcacctcaataagtaaaatgtaagccgttggcggattaggcatctttaagcgtaacctggatttgcgcagacaggcgtcaatccgacctgattttttgaatgataaaataagttttctggtttagccagtaaaagggagtgataataacgatatttggtgacaaaactcacaaaagacacgcgtttaatttgcgatacgaattaaattttcacacactctgtagcagatgatctaacaatctgattacagaacatcggcagtacaatttgcagcaaaataaaaatacggcttgaaacgagccaaatagggttctcgtagggggaataagatgaatattttaggttttttccagcgactcggtagggcgttacagctccctatcgcggtgctgccggtggcggcactgttgctgcgattcggtcagccagatttacttaacgttgcgtttattgcccaggcgggcggtgcgatttttgataacctcgcattaatcttcgccatcggtgtggcatccagctggagcaaagacagcgctggtgcggcggcgctggcgggtgcggtaggttactttgtgttaaccaaagcgatggtgaccatcaacccagaaattaacatgggtgtactggcgggtatcattaccggtctggttggtggcgcagcctataaccgttggtccgatattaaactgccggacttcctgagcttcttcggcggcaaacgctttgtgccgattgccaccggattcttctgcctggtgctggcggccatttttggttacgtctggccgccggtacagcacgctatccatgcaggcggcgagtggatcgtttctgcgggcgcgctgggttccggtatctttggtttcatcaaccgtctgctgatcccaaccggtctgcatcaggtactgaacaccatcgcctggttccagattggtgaattcaccaacgcggcgggtacggttttccacggtgacattaaccgcttctatgccggtgacggcaccgcggggatgttcatgtccggcttcttcccgatcatgatgttcggtctgccgggtgcggcgctggcgatgtacttcgcagcaccgaaagagcgtcgtccgatggttggcggtatgctgctttctgttgctgttactgcgttcctgaccggtgtgactgagccgctggaattcctgttcatgttccttgctccgctgctgtacctcctgcacgcactgctgaccggtatcagcctgtttgtggcaacgctgctgggtatccacgcgggcttctctttctctgcgggggctatcgactacgcgttgatgtataacctgccggccgccagccagaacgtctggatgctgctggtgatgggcgttatcttcttcgctatctacttcgtggtgttcagtttggttatccgcatgttcaacctgaaaacgccgggtcgtgaagataaagaagacgagatcgttactgaagaagccaacagcaacactgaagaaggtctgactcaactggcaaccaactatattgctgcggttggcggcactgacaacctgaaagcgattgacgcctgtatcacccgtctgcgccttacagtggctgactctgcccgcgttaacgatacgatgtgtaaacgtctgggtgcttctggggtagtgaaactgaacaaacagactattcaggtgattgttggcgcgaaagcagaatccatcggcgatgcgatgaagaaagtcgttgcccgtggtccggtagccgctgcgagtgctgaagcaactccggcaactgccgcgcctgtagcaaaaccgcaggctgtaccaaacgcggtatctatcgcggagctggtaagcccgattaccggtgatgtcgtggcactggatcaggttcctgacgaagcattcgccagcaaagcggtgggtgacggtgtggcggtgaaaccgacagataaaatcgtcgtaagtccagccgcagggacaatcgtgaaaatcttcaacaccaaccacgcgttctgcctggaaaccgaaaaaggcgcggagatcgtcgtccatatgggtatcgacaccgtagcgctggaaggtaaaggctttaaacgtctggtggaagagggtgcgcaggtaagcgcagggcaaccgattctggaaatggatctggattacctgaacgctaacgcccgcagcatgattagcccggtggtttgcagcaatatcgacgatttcagtggcttgatcattaaagctcagggccatattgtggcgggtcaaacaccgctgtatgaaatcaaaaagtaatctgctttatgcctgatgcgacgcttgagcgtcgcatccaacaatgacaagcggtggagatcttctctgccgctttttttttcatcaatcatccccataatccttgttagattatcaattttaaaaaactaacagttgtcagcctgtcccgcttataagatcatacgccgttatacgttgtttacgctttgaggaatccacgatgagtgaggcagaagcccgcccgactaactttatccgtcagatcatcgatgaagatctggccagtggtaagcacaccacagtacacacccgtttcccgccggagccgaatggctatctgcatattggccatgcgaaatctatctgcctgaacttcgggatcgcccaggactataaaggccagtgcaacctgcgtttcgacgacactaacccggtaaaagaagatatcgagtatgttgagagcatcaaaaacgacgtagagtggttaggttttcactggtctggtaacgtccgttactcctccgattattttgatcagctccacgcctatgcgatcgaactgatcaataaaggcctggcgtacgttgatgaactgacgccggaacagatccgcgaataccgcggcaccctgacgcaaccgggtaaaaacagcccgtaccgcgaccgcagcgttgaagagaacctggcgctgttcgaaaaaatgcgtgccggtggttttgaagaaggtaaagcctgcctgcgtgcgaaaatcgacatggctagtccgtttatcgtgatgcgcgatccggtgctgtaccgtattaaatttgctgaacaccaccagactggcaacaagtggtgcatctacccgatgtacgacttcacccactgcatcagcgatgccctggaaggtattacgcactctctgtgtacgcttgagttccaggacaaccgtcgtctgtacgactgggtactggacaacatcacgattcctgttcacccgcgccagtatgagttcagccgcctgaatctggaatacaccgtgatgtccaagcgtaagttgaacctgctggtgaccgacaagcacgttgaaggctgggatgacccgcgtatgccgaccatttccggtctgcgtcgtcgtggttacactgcggcttctattcgtgagttctgcaaacgcatcggcgtgaccaagcaggacaacaccattgagatggcgagcctggaatcctgcatccgtgaagatctcaacgaaaatgcgccgcgcgcaatggcggttatcgatccggtgaaactggttatcgaaaactatcagggcgaaggcgaaatggttaccatgccgaaccatccgaacaaaccggaaatgggcagccgtcaggtgccgtttagcggtgagatttggattgatcgcgccgatttccgcgaagaagctaacaagcagtacaaacgtctggtgctgggtaaagaagtgcgtctgcgtaatgcttatgtgattaaggcagaacgcgtcgagaaagatgccgaaggtaatatcaccaccatcttctgtacttatgacgccgataccttaagcaaagatccggcagatggtcgtaaagtcaaaggtgttattcactgggtgagcgcggcacatgcgctgccggttgaaatccgtttgtatgaccgtctgttcagcgtgcctaacccaggtgctgcggatgatttcctgagcgtgattaacccggaaagcctggtgatcaaacagggctttgctgaaccgagcctgaaagatgcggttgcgggtaaagcattccagtttgagcgtgaaggttacttctgcctcgatagccgccattctacggcggaaaaaccggtatttaaccgcaccgttgggctgcgtgatacctgggcgaaagtaggcgagtaattttaagtttcgctatgccggatggggcgtttacgtcgcatccggcaaggaacagacaaacagtttcaaacgctaaattgcctgatgcgctacgcttatcaggcctacatgatctctgcaatatattgagtttgcgtgcttttgtaggccggataaggcgttcacgccgcatccggcaagaaacagcaaacaatccaaaacgccgcgttcagcggcgttttttctgcttttcttcgcgaattaattccgcttcgcaatttatccataaaataaatttaaaataacaaaacataattaaataaaatgtaaccgctttcatcttgctggaatttcacgcttttattcttctgcaagcctttcaaccgcaaacttaagccttgtaacaaaaatcatcaaaatatgtgcggttgctcatgttcttacattctggttacagaaagagattgataattcgcgtcgcgaaaaatagtctgttcctgtagtcagcgagacttttctcaacgctacttttttaatttttattttttcgctgttcacctttggtgcagcaatttatacgtcaaagaggattaacccatgcgtacgtttagtggcaaacgtagtacgctggcgctggctatcgccggtgttacagcaatgagcggctttatggcaatgccggaggctcgcgccgaaggattcatcgacgatagtaccttaaccggcggtatctattactggcagcgtgaacgcgaccgtaaagatgttaccgacggcgacaaatacaaaaccaacctttctcactccacctggaatgccaacctcgattttcagtccggttatgctgctgatatgttcggccttgatattgctgcgtttacggcgattgaaatggcggaaaacggcgacagctcccacccgaacgaaatcgcgtttagtaaaagtaataaagcctatgacgaagactggtccggcgacaaaagcggtataagcctgtataaagctgcggccaaatttaaatacggtccggtttgggcgagggcaggttacattcagccaactggtcaaacgctgttagcgccgcactggagctttatgccaggtacttatcagggggcggaagccggggcgaattttgattacggcgatgctggtgcgttgagtttctcctacatgtggaccaacgaatacaaagcgccgtggcatctggaaatggatgagttttatcagaacgataaaaccaccaaagttgattatctgcactcctttggggcgaaatacgacttcaaaaataacttcgtactggaagcggcatttggtcaggcggaagggtatatcgatcaatattttgccaaagccagctacaaatttgatatcgccggtagcccgttaaccaccagctaccagttctacggtacccgagataaagttgacgatcgcagcgtcaacgacctttatgacggcaccgcctggctgcaagcgttgacctttggttaccgggcggctgacgtagtggatttgcgcctcgaaggcacctgggttaaggctgacggtcagcagggatacttcctgcaacgtatgactccaacctacgcttccagtaacggtcgcctggatatctggtgggataaccgttctgacttcaacgccaacggcgaaaaagcggtcttcttcggtgcgatgtatgacctgaaaaactggaatcttccaggcttcgccatcggcgcttcctacgtttacgcatgggatgctaaacctgcgacctggcagagcaatccggatgcgtactacgacaaaaaccggactattgaagagtctgcctacagcctggatgcggtctataccattcaggacggtcgcgccaaaggcacgatgttcaaactgcatttcaccgaatacgacaaccactccgacatcccaagctggggcggtggttacggcaacatcttccaggatgagcgtgacgtgaaatttatggtaatcgcaccattcaccatcttctgatgcccgacgcggcaggttttgtgcctgccgcacgtttgaggaatttgctatgaaaaaactgattctcatcgccataatggcaagcgggctggtagcttgtgcgcaaagtaccgcgccacaggaagacagtcgtctgaaagaggcatacagcgcctgtatcaacaccgcacaaggtagcccagaaaaaattgaagcctgccagagcgtgttaaacgtgctgaagaaagagaaacaacatcagcagtttgccgaccaggaaagtgtacgcgtactggattatcagcagtgtctgcgtgcaacgcaaaccggaaatgatcaggcggtgaaagccgattgtgataaagtctggcaggaaatacgcagtaataacaaataagtgagagctgtaactctcgcttttcttatttcccttgcataaaaaagccaacccgcaggttggcttttctcgttcaggctggcttatttgccttcgtgcgcatgttcatcttcgcggcaatcgccttcggcacagtgaccgtaaagatagagactgtggttagtcaggcgaatgccatgttttgcggcaatttcacgctgacgcgcttcgatggaatcatcactaaattcgataaccttgccgcagtcgaggcagatcaggtgatcgtggtgatgttgctgtgtcagttcaaatacggatttaccgccttcaaaattgtggcgggtgacgataccagcgtcgtcaaactggttcagtacgcgatataccgtagccagaccaatttcttcacccatatcgatcagacgtttgtataaatcttccgcactgacgtgatggttgtccggctcctgaagaacttccaggatttttaaacgaggaagcgttactttcaggccagctttctttagggcggtattgttatcagtcatgcggaatctgtcctgttactaagcggttcacttcattagaagaagtgacagaatttgctcttgagataatgcgtatcattatagaattgccacgcctaaatgaaaaccacaagtccctggcaaatattgttaataaaaacgtggcacagcttacatttacaacggcaaggccacttgaacaccgggacattgtacaggtacaacagcaaaagttacaaatttgtagcaattattttgattggcattatctattaatacggcgtagacatgagtctacgccgcatcacatcaggcattgagaatttcgtcgagatgcaactcttcagaaatctgtttaacccatttttctacacgttcagcggtcagttccggctgacggtcttcgtcgatagccagaccgacaaagtggtcgtcatctgccagacctttacttgcttcgaaatgatagcccgcagttggccagtgaccaacgatggttgcaccgcgcggttcaatgatgtcgcggatggtgcccaatgcgtcgcagaaatattcggcgtaatcttcctggtcaccacaaccaaacagcgcaaccagtttgccgttgaaatcaatctcttcgagagtcgggaagaagtcatcccagtcacactgcgcttcgccgtaataccaggttgggatgcccagcagcagaatgtcataagcttccagatcttctttgctgctttttgcaatgtcatggacatcggcaacgtctttaccaagctgtttttgaatcatttttgcgatattttcggtattaccggtgtcgctgccgaaaaagatgccagtgatagccatgagtgaaataacctcttgaaacttattgaaatgggggtggaaaattgcccacggataaaggcaatcatagcagaacaggcagtcttgcggaatcagcaaacgagcaggactgcacactgtgctacatgaaagtggaaatttaaacgatgccctgactacgcagcgccgccagttgctgcattaacatctcttcgatcagttcgctacggctcatattgcggctctccgccagctcgttcagcgcctcgacagcttccgcgttcagcttcagttcgacacgcttaaggccacgtactttgtcgcgttttagctggttgcgtttattaatacgcagctgttcatcgcggctaagcggattagttttcggtcgtcccggtcgacgctcgtgcgcgaacagatctaatgtcgtacggtccgtttgttctttggccatgatcttggtgacttcgggggaaacaatcagccaggcctctgcccggatggatagcgcgccataatacatcagcgcgatgagtcacgccaacgcccacgcgcggaaagcgacgcggacgctgggtttttaatcagttgcgttaatcattgagatagcgacggatagcgcgtaataccgcatccggtttttcagcatggacccagtgacccgcgcctgcaatcacatgcgcccgtgcctgtggaaattgagccagtaaatcatcacggtactgctcgctaacatacggagaattgccgccagggataaacagggcagggtgatcccatgccgggattttctcccaacctacaatatgcggatactgatcccacaataccggcacgttaaagcgccactccccgtcaacaaaagatttcagcagaaactgaatcaccccttcttcattaagatgctggcgcattattgctgctgcttgctggcgagtttgtgcgtcgctttcactgaccgcgttgatagccgcaaaaatctcatcatgacggcgtacgtgatagtcgaccggcgcgatatcgatcgccaccagtttatcgatgcgatcggaggctagtgcagtaagtgccattaccgctttaccgcccatggagtgaccgataaatgttgctttgtcgatctgctgtgcatccagagtatcaacaagatcctgcgccatcgccgggtaattcattaccggatctctcggactaagaccgtggttacgcatatcaacctggatgatattgtgatcgtttaccagatcgcgagccagtacgccaaggttgtcgaggctgccaaacagaccgtggacaagaacgatgggagaattattgtgctggttttgtgcagtttgcgcgcggatattcaatttcatggcaaagttctttttttcgcgttgtcgggttagggtattatgttgaccattgtgccacagggctgcaacaaataaggtttattccgagtttttctgcaagccaggcttgacgctatccgctgccgggatttattcatatactcctggcgacttgtattcagctaagacactgcactggattaagatgaaaacgattgaagttgatgatgaactctacagctatattgccagccacactaagcatatcggcgagagcgcatccgacattttacggcgtatgttgaaattttccgccgcaagtcagcctgctgctccggtgacgaaagaggttcgcgttgcgagtcctgctatcgtcgaagcgaagccggtcaaaacgattaaagacaaggttcgcgcaatgcgtgaacttctgcttagcgatgaatacgcagagcaaaagcgagcggtcaatcgctttatgctgctgttgtctacactatattctcttgacgcccaggcgtttgccgaagcaacggaaagcttgcacggtcgtacacgcgtttactttgcggcagatgaacaaacgctgctgaaaaatggtaatcagaccaagccgaaacatgtgccaggcacgccgtattgggtgatcaccaacaccaacaccggccgtaaatgcagcatgatcgaacacatcatgcagagcatgcaattcccggcggaattgattgagaaggtttgcggaactatctaaaacgttgcagacaaaggacaaagcaatggcaatccacaatcgtgcaggccaacctgcacaacagagtgatttgattaacgtcgcccaactgacggcgcaatattatgtactgaaaccagaagcagggaatgcggagcacgcggtgaaattcggtacttccggtcaccgtggcagtgcagcgcgccacagctttaacgagccgcacattctggcgatcgctcaggcaattgctgaagaacgtgcgaaaaacggcatcactggcccttgctatgtgggtaaagatactcacgccctgtccgaacctgcattcatttccgttctggaagtgctggcagcgaacggcgttgatgtcattgtgcaggaaaacaatggcttcaccccgacgcctgccgtttccaatgccatcctggttcacaataaaaaaggtggcccgctggcagacggtatcgtgattacaccgtcccataacccgccggaagatggtggaatcaaatacaatccgccaaatggtggcccggctgataccaacgtcactaaagtggtggaagacagggccaacgcactgctggccgatggcctgaaaggcgtgaagcgtatctccctcgacgaagcgatggcatccggtcatgtgaaagagcaggatctggtgcagccgttcgtggaaggtctggccgatatcgttgatatggccgcgattcagaaagcgggcctgacgctgggcgttgatccgctgggcggttccggtatcgaatactggaagcgtattggcgagtattacaacctcaacctgactatcgttaacgatcaggtcgatcaaaccttccgctttatgcaccttgataaagacggcgcgatccgtatggactgctcctccgagtgtgcgatggcgggcctgctggcactgcgtgataagttcgatctggcgtttgctaacgacccggattatgaccgtcacggtatcgtcactccggcaggtttgatgaatccgaaccactacctggcggtggcaatcaattacctgttccagcatcgtccgcagtggggcaaagatgttgccgtcggtaaaacgctggttagttctgcgatgatcgaccgtgtggtcaacgacttgggccgtaaactggtagaagtcccggtaggtttcaaatggtttgtcgatggtctgttcgacggcagcttcggctttggcggcgaagagagtgcaggggcttccttcctgcgtttcgacggcacgccgtggtccaccgacaaagacggcatcatcatgtgtctgctggcggcggaaatcaccgctgtcaccggtaagaacccgcaggaacactacaacgaactggcaaaacgctttggtgcgccgagctacaaccgtttgcaggcagctgcgacttccgcacaaaaagcggcgctgtctaagctgtctccggaaatggtgagcgccagcaccctggcaggtgacccgatcaccgcgcgcctgactgctgctccgggcaacggtgcttctattggcggtctgaaagtgatgactgacaacggctggttcgccgcgcgtccgagtggcacggaagacgcatataagatctactgcgaaagcttcctcggtgaagaacatcgcaagcagattgagaaagaagcggttgagattgttagcgaagttctgaaaaacgcgtaaacacatttaataaaaaaagggcggtcgcaagatcgcccttttttacgtatgacaaacacagaattgcctgatgcgctacgcttatcaggcctacgaggatggtgcaatatattgaatttaagcgattttgtaggccggataaggcgttcacgccgcatccggcaaaaacaacgaacactttgtcaacaaactgagtagctcaaggaaatcccaatgaagaccaacaggagtctggtcgtcatagtgagtctaattaccgccacattactgctgactgcatgcgcccaacctgaacaaagtagtttagctggcgactggttactgacccctaaagataaaaccagaggattaacgggtagcattgcggtaaatattgcacctttccggtgtaagacaaattgccgtggtgataacttacctgataatacccgccgctggcagttgagtggcgggaacgaaaaagaacttacttatcttcataatatgagtgcacaagaaaaggtcggtttaaatcccggttggcaatgctacaccagtttttttatgcgggtttgccagggcaagcccggcactcgaccgatagtcaatgaggattatgtcagcgaaagcggattttttggcagcatgatgcatgtcgggattattgagttacgacgctgccagagtgaaaattgccagcaagaattgaaagcgataaatacacattaaaatagtgagtccgggaatgaaacccggacctgaacatgtcttattgcgtgaatgtttctttcatttgatactgcatttcccagagttcagtaaggctaataacttttcttgttcttgcttcttcactttgtacccataagaaagggtagaacgtgaaggcttccgttgcgcttaattttattacgtcttctcgccattgctgccatcgtacattttcatagaaggtatctaaatcaccggataatgcccactgaagaaactcagaatatccaacttccagactttcccaattcagcgtatctggcgcaaaataataaacgcagccagtatcttccccaagatcgccaccattaagagcaaaaattacccctgcgacatcgtcagcgatgggtaaagcccgcacgcctgcgaattcagggcgttgtgtccaacttactggatctcgtggcaaccgggggtgaccagatcctgctatgcgtaattaaccattatcaatcagcagacctccggagccatagacaagcgcacccatcggactttttgttgtcacctgtaattgataaagtgcggtttcggctaaatctttattaaccggtaagagttcggtatggtttgtggcgtcttttaaccagttctggattattggccaggcactatcttcagtatttactaactgattcatttcacgcatcgctacttgctccttgtgtgctacggtgtcatttatgatgaggaattgtatggaacattttttaaatattaagttccttatatttgaataaaaaatgactttatccatacattgccacttttttcaaagcataaaccgatacccaataccggtttcagtaataaaatggcgaggccgggccggatcctgttccagtttttgtcgcagatgccccatataattacgcaaatagttgctgtgttcgatcgcgtttagaccctacatctgccggatgcggcataaataacgaactatttgccaacaaacagaaagggcgatcattcaatcgcccttttttactttgttttattaaccgtgtttatttttcagttcaaagcgtggacttaccagaccatacagtgtccaaccaaggaaggtcacgatggaaccgtacagcatggcttcttccccggaactgtacagcgcataaaagctatacatcgcgccaacaaaagcaacaaagtttgcaactttcgctttactggggggcacattagcgaccttctgaataatgactaatgccgccatactcagaatatacggaatgatattggtcaccacggccaggttaaccagcacgttgaactgactgtttaggctcgggctaatggtcatcagtgccaatccactctgaataatcacaatggtcaacattccctgcaccggtgcatccactttggttacacgggagaaaattttagggaagtagccttcatcagaactagatttaaacacctgggcaatggtgaactgccagccaagtaggctaccgcagcaggacatcaccatcagcgccataatgactttacccacttccggcgtgaacatctgcgcgaaggccagaccaaatggtgccgtactatttgccagctccatatttggcacaatcccggcaatcacgttggtggagacgatataaatcaccgccgcacctaacgtaccgccgagtaccgcgattggcacattacgttccgggttttccactacatcagtattcgcacacgcagactccagaccaagaaaagcccacagcgtcatagcgatggaagaacctaccgcactgaagaacggtgcatgatgcggattccaggaatcaacgtacagcgtcgggctaaaccagaaccagccaataatgcacagaccgacgaccggaataatgaccccccacacggtaatgctactgatttgcccggtaatgcgcgcaccaccaaagttagccacggtacaaatccacagcaccccgatggtcgcaagaccaatctgcactgggctcaaactcgcgccgagcagttcggtgccgtaaccaaccgcgctaatagcaatcgcgacgttagcaatcagcagactgacgccgtaggtatagttcgccataaagttaccggatttaccgaaagcatactcggcataaccgcccataccgccacttttacggctgaacataccgcattttgcgaatgcccatgccagtgccatactgcctacggctgtcaccagccaggagataatactgattgtcccgacttcggcaagctttgtcggcagcatgatgataccggagcccatcatgttgaccatcgtcagtatggttaactgaacgacgcccattttgttgcttttagcctgactcataatttttcccctttcaacagggtgctttgcgcatcacgaggcttgatgacatagcaccaaacttgcttacgaccatcatgttcttcgatatagacaccctgcagctccggtgcaaaacctggcagcaggttgatcccttcttccagagcgctgaagtaacgcagaacagcaccaccccagatttcacccggaacaacacacagcacacccggaggataaggaagcgcaccttcggcagcgatacggccttctgcatccggcagacgaaccagttccacttcaccgcgtaaataggcgtagttggcttcttgcggattcatgctgacgcgtgggaagtgctccttacggaacatctctttttgcagttgtttcacgttgtggcgggcatacaaatcatgcatttcctgacacaactgacgcagggtataaccggcgtagcgctcttcatgctgtttgtagatggaaggtagcacttctgctaatggcgcgtcggactcaagcagtttttcgaagcgtaccagcagggcaacaagttgctgaagtttggccatatcttctgccggagtcagcaggaagaggatggagttaagatcgcatttttccggcactacgccattttcgcgcaggaagttagcaagaatcgtcgcgggtacaccgaacgcttcatattcgccgttacgtgcatcaatacctggggttgtcagcaacagtttgcatggatcgacaaagtattgattctctgcatagccttcaaaagaatgccagtgttcccctggtacaaactggaagaagcgcagatcaaccgcaatttgcgctgtttcatagctctgccagggtttaccatccaccagttcaggtacgaacggacgaatatgctgacagttatcgaggatcagtttgcgggcattaatgccatttaccacacaatccatccacatattacgaccgctgacaccttcatgcattttggcgttgatattcagtgcggcaaacagcggatagaacgggctggtggaggcgtgcatcataaaggcgttgttcatgcgtttgtgcggtacataacgctgttgccctttgatgtggctgtcttttttatgaatttgactagtctgagaaaaaccagcctgttgtttatgcacagattgcgtaaccagaatacccggatcgttctcattaagatccagcaacagcgggctacagtccgccatcatcggaataaactgttcatagccgacccatgcactgtcaaacaggatgtagtcacacagatgaccaattttatccaccacttggcgggcgttataaatcgtaccgtcgtaggtgcctaactgaatcacagcgaggcggaaaggacgagcctcttttgcccgctgcggtgcgacttccgcgatcagctcacgcaggtaactttcttcaaaacagtgcgcatcaatgccaccgataaagccatacgggttacgtgccgtttccagataaaccggtgttgcaccagcctgtagcaacgctccgtggtggttagatttgtggttattgcgatcaaacagcaccagatcacccggtgttagcagggcgtttaaaaccactttgttagaagaactagtgccatttaaaacgaagtaggttttatcggcattaaacacttttgccgcatgttgctgtgcaatgcatggcgcgccttcgtgaatcagcagatcgcccatcgctacgtcggcgttgcacaagtcggcacggaacagcgcctcaccaaagtattccacaaactgattccccgccggatggcgacggaaaaattcgccgccctgatgaccagggcaatcaaacgcgctgttaccttgattgacataatcgaccagtgcgcggaagaaaggtgggcgcagttgagtttcataatggctggcagcggtttctaactggcgaccataaaattctcgtcggctttcgcaattctcaaagacaccgctaatacggggcaaatactctgcgggtacacgttcttgattttcagtagcaataaataccgggatgccataacccgtggcatcgatttcatcgagttttccgcatgtaacatcgttgaggcttaaaactattgccgccacatcgatattacgactttcattaatgtagatacattctcgctgcgtggtaaaacagtccgggcaagaatcactaaccgcaatttttaatttactcatttttcatctctttattttaggtaatagcaggtcctcaatttctcgaatgagaaatcgatcgtgccggaaaaaagcaaagttaccccgctgataaataaatcaggtagattgcttttttcagaatgcagaaacccttaccagtcaggtggctgataatacaagggttaacagagaatgagcactgcggaatacaggcatatgcctgtaatacagagagtcaggaagacctgtacgctgaagtgcccttagtcggtagactaacgggcattgaagaagtgaaagtcgaagctattgcgatgagcaaacttcataatatgagttgtccgccttatatggggcatagtgcggctgttattttccatttaatttacctttcctgatgtgaatgaaggtgaagatattctatccaggaaatacggttgaactgtgaaggtgatcaataaaaaatgatcaatcttaatttatttaatgatgagctttttactcagtaatataaaatattgaattgttatttttgtgtgttgtttaagataaaaagccgtatttattattacggctttaattaataaaaggcaggctgtattaaaattaatattcaaagcataaaccgatagccaataccggtttcagtaatgaaatggcgtgggcgggcgggatcctgttccagtttttgtcgcagatgtcccatataaatacgcaaatagtgactgtgttcgaccgcgtttggcccccacacctggttaaggagctggcgctgggtgagtacttttccggcattgttgagcagcaccgccagcaggcggaactcaattggtgtgagatgcacctcttcctcaccccggtgaatcacgcgggcggctaaatcgacggtaacatcggaaaattttaccagcggatcgggcgcggtggtggcagagtggcggcgtaatgcgacgcgcagacgggcctgcaattcgccaatgccaaacggcttactcagataatcatccgctccggcatccagcgcggcgattttgtcgctctcttcgctgcgtgcggaaagcacaatcaccggcaccgcgctccactggcgcaggtcgcggataaactcaatcccatcaccatcgggcaggccgagatcgagaataatcaaatctggcttacgggttgccgcttccagcaagccgcgttgcagcgtttcggcctcaaagacgcgcatcccgtcgccctccagcgccgtgcgcagaaagcgacgaatagcctgttcatcttcaacaatcagaacgtttgtcacatatcctcatgaaattcttcaagttcaggggcagtttgctggggaagtgtaacacgaaaacaggcaccaccttccggtcggttgaacgcggtaatagtgcccccgtgtacatccactatcgcccgacaaattgccagtccaagccctacccccggtactgcgctctctttattcccgcgagcaaacttatcaaatatcgtctgctcctggcctggcggaagaccggggccgttatcccagacatccagttgtagattttcgccctcaacgtgggcatcgataccaatttcggcctgcgcacccgcatatttcaccgcgttctccagcagattaatcagcacccgttcaaagagtggcccgtcaacgtggattaaggtcagcggttctggcagagaaagattgatggggctgcttaaacccggttccagcatttgcagcgcgctgccgactacttcttccagcgttaaccactctttcttcaaattaaagccgccggactgaattcgcgccatatccagtagattattcaccagtcgggtagtgttcagcacatgctgacggatctcgctggcctggcgggcgtggggacttccttcgcttgccagatcgagcgttaagatttctgcctgaccaaacagcaccgtaagcggcgtgcgtaaatcatggctaagcgccgccagcagggcgttgcggatctgttcacgttcgcttgccatccgcgcctgttcttcgctggcggttagcgtcagccgctcaagggcattggcgactaacagcgtaaacgtctccagcaggcgctgctgttccgggatcatcaactggcgcagattccccggctccaccaccaccagcccgtaggttttctcgccgctttttagcggcaaaatctggtacggtacaccgggtaacgtgtcggtgcccgcgcccgcaggcaggcctttatcaaaactccactgcgcgatggcatcgtcccacggcgtcattccttgcggatgtgttaacggctgcaatttaccgttgtcatcgggcaacaacacctgactgcgggcatgaaacgtggaggcaataaattgttcgctggtggcagcgatatcctgcggactgcggcccaccgccagagctttgctcatttcatataagtgccgtgtgcgttgctcgcggtaacgggctacccgcgcctgataacgcacgccagcagtaaggttcccgatcaccagcccgacggttaacatcaccgcgaaggtcagcagatattgcacatcagagacggcgagcgtgccgcgtggggcgataaaaaagagatcgaaactcactacattaatgacggtggcaaccacactaggccagcgtccataaaatagcgccaccaccaccacgccaagcagatacagcatcaccaggttggcggcatcaaacgccatcagccactgcatggcaattaaggtgataacggcgcataacgcggcggcaaccacgcatccctgaatttgtacacgccacttgtctttaaaagagcggttatccggcgcgttgttaatcgtgcgggcgggtggttcatcaagcgcgaccagcacctgatcgagatcgggggcgatgcgcgccagtcggtcagcaaacgtttcccgacgccaccagcggcggctggccgggcgaccgagaataatcttgccgagattatgttcacgggcataacgcactaccgctttctcttccgctggatcagaaagtgttgccgtctccgcgcccagttcctgcgccagacgtaaggcgctgagaattgcccgacgttttttttccggtaagcggtgcagggcaggggtttcaacatacaccgcgtgccagacgctacccagccgactcgccagccgcgccgctgcgcggaccagtttttcgctgccggtgttatggccgatgcataaaaggatcgcgtcgcgcgtgcgccacactttctcttcgccaggatgcccccgccaggcgcgcatttgctcatcaacgcgatcggcagtacggcgcagtgccagttcgcgcagggcgatcagattacctttgcggaaaaaatgttcaatggcgcgctccgcctgcccggcaatatagactttgccttctttcagccgctggcgcagatcgtccgggggcaagtccaccagcaccacgtcgtcggcggcatcgaaaaaaggatcgggcacggtttcccgtacctgaattccggtgacgccgctgaccacatcattcagactttccagatgctgaacgttgacggtagtgaaaacatcaatgccagcttccagcagttcttcgatatcctgccagcgtttgggatgacgggaacctggcgcattactgtgcgccagttcgtccattaagatcagcgccgggcggcgggcgagggcggcatcgagatcaaactcgctgatatgccgcccacggtacgcctggcgttttaacggcagaacagccagcccttccagcatggcggcggtatcttttcgcccgtgggtttctaccacgccaaccacaatatccagcccttgcgcccgcagtcgctgggcttctgccagcatcgcccaggtcttcccgacgcctgcacaggcaccgaagaaaactttcagcttcccccgatgcggcgcggcagtttgttccagcagacgatcggggtcgggacgtaagggttcgttattcatcaagtttatccagcgccagattgagttcaacaatgttgacaaccggctggccgatatatttcaccagcggttgttggctgtattttgcgatcagttgcgtgagctgttcaacgctgagattacgcgctttcgccacgcgtgggatttgccaggccgccgcttgcggggtgatattattgtccagcccgcttgcgcttgccgtcaccagttcaaccggaacgctcgcgctggcatccgggttagcggcccgtaatgcagcaacgcgtgcggctattagtttatccagctcagggttactgaccgccagattgctcccgccagaagcctgtggattatagggcatttctgccgttgcgctcgggcgaccatgaaaatagccgttgccggtaaaattctgcccgattaatgcgctaccgcgcaccgtatcaccttcacgaatcaagctaccattggcctgccagggaaaccaccattgccccagtacggtggtcagcagcgggtaaacgccgccagtaatcaataacagaaagataaatgtacttaatgccggacgtaatccactcatggtaaacctcacaccagaccgcaaacggtcagcagtaaatcaatgactttgataccgataaacggcaccagcagcccacccagaccgtaaatccataagttacggcgcaacatggcagaagcggtaagcggtttataactcacgccttttaacgccaggggaatcaaaaagacgataatcaaggcgttgaaaatcaccgcactgaggattgcggagtcggggctatgcaggcacatgatgttcagcgcatttaactgcggatacgttgccgcgaatgccgccggaataatggcgaagtatttcgccacatcgttggcaatgctgaaggtggtcaggctgccacgggtcatcagcatctgtttgccaatgtgcaccacctcgatcaacttggtcgggttagagtcgagatcgaccatattgcccgcctctttcgccgcctgggtgccggagttcatcgccaccgcgacatctgcctgcgccagcgccggagcatcgttggtgccgtcgccggtcatcgctaccaaacgaccttccgcctgatactgacggatcaatgccagcttggcctccggtgtcgcttcggcgagaaaatcatcgacacccgcttccgcagcaatcgcggcggcagtcagacggttatcgccggtaatcatcaccgttttaatgcccattttgcgcagctgggcgaagcgctctttaataccgcctttgacgatatctttcagcgcaataacgcccagcacacgagaaccttccaccaccaccagcggcgtggctccctgacgcgcaacctgatcgactttttgatcaacatcggtagggaagtgaccaccgttagcctcaacatggcgacgaatggcatcgacagaacctttacggatcatgcggttgtcgatgttgatcccgctcatccggctttgcgcagtaaacggtacaaaggtggcatggaggctctgcacatcgcgctcgcgcaggttaaaacgctgcttggcgaggatcacaatactgcggccttccggcgtttcatcagccaggctagccagttgtgcggcgtcagccagcgttttttcatccacgccctgcgcggggataaactcgctcgcctgacggttaccgagtgtgatggtgccggttttatccagtagcagaacgtcaacgtcacctgccgcttcaactgcacgtccgctggtggcaatcacattcgcgcctagcatccggctcatcccggcgacgccgatcgcactcaacaggccgccaatagtggttgggatcagacagaccagcagcgccaccagtaccgttacgctgactgcattaccgccccacgcggaaaacggccacagcgtggcggttgccagtaaaaagacgatagtcagggcaatcagcagaatggtcagggcaatttcgttcggcgttttgcgtcgctgtgcgccttccaccatcgcgatcatccgatccagaaatgtctcgccggggttaacgctacactcaatcaccagccagtcagaaagaatacgcgtgccgccggtgacggaggcaaaatcgccgccggattcacggatcaccggtgcgctttccccggtgatggcgctttcatcgacgcttgcacccccttcaataacttcaccatcgcaggggataatatcgccagcttctaccagtacgatatcgcctttacgaagttggtcggcaggaactttgtccgccgcagcgccatatttcggctcacgcagcttgcgggcaaaggcagtttttttcacccctttcagactgttggcctgcgctttactgcggccttctgccagcgcctcggcgaaattagcgaacagtacggtgatccacagccaaccgctaatggccgcgctaaacagcgcattgccgggcatcgcaccgcttgccatcgcgatgctaatacaggtggtcagcagactgccgatccagacgataaacatcaccggattgcgccattgcgcctgcgggtttaattttttcaccgcttctttcagcgcctgaacgacaagtgttggttcgaatagcgccagttgtttacgactcatattcagtgctcactcaatatcatcaggagagatattccgccaccggaccaagcgccagggcagggataaaggtcagtgcgccaaccagcaacacggtgccgattaacaggccaacaaacagcgggccgtgcgttggcagcgtgccggagctggcggcttggctctttttactcaccaggctaccggcaattgccatcaccgggataatcaccccgaagcgaccgacaaacatgcagaacgccagtaaacagttccagaacggagagttggcgcttaatccggcaaaggcgctgccgttgttgttagcggcggaactcacggcgtacagcacttcgctaaaaccatgcgggccagggttgagcatggcgctacgtccggcgtcggtcatcatcgccaacgccgcgcccatcagcaccagcgtcggggtaaccagaattgccagtgcagtcagtttcatctcgcgtacgtcgatttttttacccagatattccggtgtacgaccaatcatcagcccggcaataaacaccgccagcaggacaaacagcatcatgccgtaaagaccagaaccgacaccgccgaacaccacttcaccaatttgcatcagccacatcggcaccatgccaccgagagcggtaaagctatcatgcatcgcaatcaccgcgccacaggaagccgccgtcgtcacgaccgcaaacaggctactgaccagcacgccgaaacggctctctttaccttccatattgatgctgctgtccgtgcccagtgccagcagatgaggattaccctgaacttctgcccacatcaccacgcctacgcagatgacaaaaatcacactcatcgcccacagcaacatgcgcccctggcggcgatcgcccatcacttcaccaaaggcaaagcacagcgccgttgggatcaagaagatcgccagcatctgcacgaagttggtcagtgcggttgggttttcaaacggatggctgctgttggcattaaagaagccaccgccgttagtaccgagcatcttgatcgcttcctgagaagctacaggccccatgggtaacagctgttgcgctccttcaacggtattcacagcctgataaggcagaaagttttgcagcgcaccttgttgaataaaaaacagtgcaatcaacaacgccacagggactagcacccataacgtgatgcgtagcagatcgacccaggcattcccgagcgtgctcatgctctggcgggtaaacgcacggatgagggcaaaaatcaccgcaatcccgctggcggcagaaagaaagttttgcaccgttaagcccgccatctggctgaaatagctcaacgtggtttcaccgctataagattgccagttggtattggtgacaaagctgacggcggtattcagcgccagatcccagctcagccctggcaactgctgtggattaagcggcagatagtgctgaccgagcaacataaaaaacagcaccgccagccccagcatgttcaggccgagaatggcacaaagatattgcttccagttcatctcacggtcagagacgccaagtgcgcgaaaaagtacgcgctcaacgcccgttgtaccgggaagaggaatgtcattaatcagccgcgccagcccgctgcctaaaggacgcgccagcaccattaacaccagtaaaaacgtggcgatcagtaagaacccttgcgcagccatcagaacgcctccgcattgatcagggcataaaccagataacccagtaataaaaacaccagcaatacgccggttatcacgcctgcactcacagtgcacctccagtggcctaaaagtgataccggaagggtagaattctggctgcaaagatttcgcaaaaatctgcgggcggggtgtaaaaaaagtataaaaatggcaaaagccatgatttaactaatgtttagtattaatttaacttttgtgtaacttaattacaggatgaatgtaaataaaccatcaataagcaaaaataagtggtcggatgagtagtaaaattacacaaaaggcggtactattttcatcagataaacaaattcatttttccggtgccattcaccgggtagatacaaaagggggagaaaagtatggaactctacagagaatatcctgcatggcttatctttttacgccgtacttatgcggttgcagcgggcgttctggcgctgcctttcatgcttttctggaaagaccgcgcccgcttttacagctacctgcatcgcgtctggagcaaaaccagcgataaaccggtgtggatggatcaggccgaaaaggcaactggtgatttttattgattgctgagttttgaatacattgaacgtctacacttactcctgtaaaccgctcaggagcagtaatgaatctacaacgatttgatgacagcaccctaatccgtatctttgcccttcatgagttacatcgactgaaagaacatggcttaacgcgcggggcgcttctcgattatcacagccgctataaactcgtctttctggcgcattctcagccggagtaccgcaaacttggcccgttcgtggctgatattcaccagtggcaaaatctggatgactattacaaccagtaccgccaacgcgtagttgttttgctttctcaccccgccaacccgcgcgatcacaccaatgttttgatgcacgttcagggttattttcgcccgcatattgattccacagaacgccagcagctggctgcgcttatcgacagttatcgccgtggcgagcaaccacttcttgcgccgctgatgcgtatcaaacactatatggcgctttatcctgacgcctggcttagtgggcagcgttatttcgaactttggccgcgtgtgattaacttgcgccatagtggagttttatgactacccatctggtctggtttcgccaggatttacgtctgcacgataatctcgcactggctgccgcctgccgcaatagctctgcacgcgtgctggcgttgtatatcgctacaccacgccagtgggcgacgcataacatgagcccgcgtcaggctgaacttatcaatgctcaactgaatgggctacaaatagcgcttgcggaaaaaggtattcctttattgttccgtgaagtggatgactttgtcgccagtgtcgaaatagttaaacaggtgtgcgcggaaaacagcgttacccacctgttttataactatcagtatgaagtgaatgagcgggcgcgggatgtggaagttgaaagagcgctgcgtaacgtggtgtgtgaaggatttgatgacagcgtgatcctgccgcctggcgcggtgatgaccggtaatcacgagatgtacaaagtctttacgccttttaagaatgcctggctgaaacggctgcgggaagggatgccggagtgcgtcgctgcgccaaaagttcgtagtagcggaagcatagagcccagcccatccattacgctgaattatcctcgtcagtctttcgatactgcgcattttccggtggaagaaaaagcggcgattgcgcaattacgccagttttgccagaacggtgccggagaatatgagcaacaacgagattttccggcagtggaaggcaccagccgtttgagcgccagcctggcaacgggcgggttaagccctcgccagtgcttgcatcgcttgttggctgaacagccgcaggcgctggacggtggggccggtagtgtctggcttaatgagctgatctggcgcgagttttaccgtcacctgataacgtatcaccccagcttgtgtaaacatcgtccatttattgcctggacggatcgtgtacagtggcagagcaatcccgcacatttacaggcctggcaggaaggcaaaacgggatacccgattgttgatgccgctatgcgtcagcttaacagcactggctggatgcataacaggctacggatgattacagccagttttctggtgaaagatttattgatcgactggcgcgaaggcgagcgatatttcatgagccagctgattgatggtgatttggcagccaataacggtggctggcagtgggccgctagtaccggaaccgatgcagcgccgtattttcgtattttcaacccgacaacccagggcgagaaatttgatcatgagggcgagtttatccgccagtggctaccggaactgcgcgatgtgccagggaaagtggtgcatgagccgtggaagtgggcgcagaaagcaggtgtgacgctggattatccgcaaccgatagtcgagcacaaagaagcgagagtacaaacgttggcagcgtatgaggcggcgcggaaggggaaataacagacgcgtcaggcaatcgagcccagatgccggatgcggcgtgaacgccttatccagcctacaaatttgtgcaaattcaataaattgcaggaaatacgtaggcctgataagacgcgtcaagcgtcgcatcaggcatcggtgctggcctattaagactccagcgccagcgcgcggtttctgaatttcagcgcctgatacagccaaatcatcagtaccagtcctacacacgccagtgcgccccaggtaatttgatcaaatacttcaatatatgcattgatggagtagttgatcgccccggaagcatcaaagctagcctggcttgtctgatcggcaatcacgcccgccagatagttcgcgatcgcgccagaaagcagcatgtagatgccggttaatacgccggtcacaccggggatttcaatgcgcgtaatttggctcatggcaaccgggtcgataaacagttccgcaaagcccatcaccgccaggcctaataccatcagtggcagagaagagtgaccatacattgcggaccagcgggcgcttaaggtcagaatgcagaatccggcgctcatcaggccaaggccaagagcaaatttcccccagatgcgcacggtacgattacccgcgacactctcttttaccacccacgccaggaacacaccgcacagcataactgcgaaggcattaatgctctggaacatcgcggtcggaacggtataaccaaacatatcgcggttaacgaagcggtcgatataaaggctaatgctgctaccgccctgttgtgcgaaggcccagaacaacatactgaagaaggtgagcgtcacaatcagccccagctccttccgctgtttctggttttctgctttgcgataaatttttgccagtacacccaggccaataatagtcgcgacaattaaggcgtatacgctccactctttccagaacagtatggtaatcagtgcaggcgttgccaccagcagaaccagcagccatccccagttcggcaggagaaagtttgtcgcacgcagtacttttttgttaacgccgcgggtatgagtgaaatgacgattgccacataagaaaatgaccagacccgcgatcatgccaaccgccgccaggccaaagcccatcgcccagctgtactcttcctgggcgtaaccacaggcgataggtgcgataatagaccccacgttacccgccgcatacatcaggctgaaaccgccatcacgacgcggatcggttggctcatacagctcgccgagcagacagcttacgttagatttaaacaggccatagccgcagacgataatcgccagggacagatagaggaaactcggatggatctcactggcacccagcaccacatgaccgatcgccatcaacaacgcccccagcatcaccgccatgcgattgccgagaactttatccgccaaaaagccaccgaggattggcgtgacatacaccaggctacagtaggcgctaaataactcgtaggcgtgagtatcgttgtattttagttgattggtgagatagagaatcagcagggcacgcatgccgtaaaagctaaaatattcccagatttgcagcgcaacgacatagtaaatagcgcgcggctgacttgcgtgtttattcataataattccacaattgacggcaacgtcacgtaatagttgcgcggcgtgcttgtgtttccttaaagttaaaactttgatacagatctgattatttatgcaatatgctgtctgattgcataaatatacattagctgaagcgtgatgatataaacaatttgcgtcttttggcgtcgggtttgtttcttaatatgtcaaaagattggctatcgacgaactggcgaggtaacgctatgttaacggtgtagctatcagaatacggaaggcgcgaagatgaaaaacaccgaactggaacaactgattaacgaaaaactgaacagcgcggcgattagtgattacgcgccgaatggtttgcaggtggaaggcaaagagacggtgcaaaaaattgttaccggtgtcaccgccagccaggctttgctcgatgaggcagtgcgtctgggcgcggatgcggtcattgtgcatcatggctacttctggaaaggagagtctccggtcattcgcggaatgaagcgtaaccgtttaaaaacgttgctggcgaatgatatcaacctgtatggctggcatttgccgcttgacgcacatcctgagctgggcaataacgcacagctggcggcgttactggggatcacggtcatgggcgaaattgagccgttggtgccgtggggcgaactgaccatgcctgtgccgggactggagctggcttcctggattgaagcgcgtctgggacgtaagccgttatggtgtggcgataccggacctgaggtggtccagcgcgtcgcctggtgcacgggcggcgggcaaagttttatcgatagcgccgcgcgttttggcgtggatgcttttattactggcgaagtttctgaacagaccattcatagtgcccgcgagcagggattgcatttttatgctgcaggtcaccatgccactgaacgtggtggtattcgcgcattgagcgagtggctgaatgaaaataccgatcttgatgtgacctttattgatattcctaatcctgcataacgaataatcagagggatcgaaagtgcaacgagcgcgttgttatctgataggtgaaacggcggtagtgctggaactggaaccgccggtgacgctggctagccagaaacggatctggcgactggcgcagcgtctggtggatatgccgaatgtggttgaagccattcccggcatgaacaatatcacggtgattttgcgtaatcctgagagcctggcgctggatgccatagagcgtttgcaacgctggtgggaggagagcgaggcgctggagccggagtctcgctttattgaaattccggtggtttacggtggtgcaggcggaccggatttggcggtggtcgcggcgcattgcgggttgagcgaaaaacaggttgttgaattgcactcctccgtggaatacgtggtctggtttttaggttttcaaccgggcttcccgtatctcgggagtttgccggaacaactacacacgccacggcgcgctgaaccgcgcttactcgttccggcaggttctgtcgggatcggcgggccgcagactggtgtttatccgctggcaacgccgggtggctggcagttgattggtcataccagtctcagcctgtttgatccggcgcgtgacgaacccatcttattacgtccgggagacagcgtgcgctttgtaccgcagaaggagggagtatgctgaagattattcgtgcgggcatgtataccactgtgcaggatggcggtcgtcacggttttcgccagagcggtatcagccactgcggcgcactggatatgcccgcgttacgcattgctaacctactggtgggtaatgacgccaatgcccccgcgctggagatcacgctcggtcagttaactgttgagttcgaaactgatgggtggtttgctctgacgggtgccggttgcgaagcgcggctggatgataatgccgtctggaccggctggcgattgccgatgaaagcaggccagcgtttaacgcttaaacgcccgcagcacgggatgcgcagttatctggcggtcgcgggtggtattgatgttccgccggtaatgggcagttgcagcaccgatctcaaagtggggattggcgggctggaaggccgtttactgaaggatggtgaccgactcccgattggcaaaagcaagcgtgattctatggaagcgcagggcgttaaacagctgctgtggggcaaccgcattcgcgccttgccggggccggaatatcatgagttcgatcgcgccagccaggatgcattctggcgtagcccctggcagcttagcagccaaagtaaccgcatgggctatcgcttacaggggcaaattttaaaacgcaccaccgatcgcgaactgttatctcacggtttgttaccgggcgtggtgcaggtgccacataacgggcagccgattgtgttgatgaacgacgcacagaccaccggtggttacccgcgtattgcctgtatcattgaggctgatatgtaccatctggcgcaaattccgctcggtcagccgattcattttgtccagtgtagtctggaagaggcactaaaagcacggcaagatcagcaacgttattttgaacaattagcgtggcggctgcacaatgaaaattgacctgaacgccgatctgggcgaaggctgcgccagcgacgcagagctattaacgctggtttcctctgccaatattgcctgtggatttcatgcaggcgatgcgcaaatcatgcaggcttgcgtgcgtgaagcaataaaaaatggtgtcgcgattggcgctcacccgagttttcccgacagggaaaattttggtcgcagcgccatgcagctgccgccagaaaccgtttacgcccagacgctgtatcaaattggcgcgctggcaacgattgcccgtgcgcaaggcggcgtaatgcgtcatgtcaaaccgcacggcatgttgtacaaccaggcggcgaaagaagcacaactggcagacgccatcgccagagcggtatacgcttgcgatccagcattgattctcgtcgggctggcgggaagcgagctgattcgtgcaggcaagcaatatggtctgacaacgcgcgaggaagtgtttgccgatcgcggttatcaggctgacggcagcctggtgccgcgaagccagagtggcgcgttgattgaaaacgaagaacaggcgctggcgcaaacgctggagatggtgcaacacggcagagtcaaaagtatcaccggcgaatgggcaacggtcgcggcgcaaacggtctgcctgcatggcgacggcgagcacgcactggcgttcgcccgccgactacgctctgcatttgccgaaaaggggattgttgtcgcagcataaccccgattaataaagaatgaaaaaaggatatcaccatgcctgaaggcccggagatccgccgtgcagcggataacctggaggcggcgatcaaaggcaaaccactaactgatgtctggtttgccttcccgcagttaaaaccttatcaaagtcaacttatcggtcaacacgttacccatgtggaaacgcgtggtaaggcgttgttaactcatttttccaacgacttaacgctctacagccataatcagctttacggcgtctggcgcgtggttgataccggcgaagagccgcagaccacgcgagtattgcgggtaaaactgcaaacggctgacaaaaccattctgctttatagcgccagcgatattgagatgttgaccccggaacaactgaccacgcatccgtttttacaacgcgttggtcccgatgtgctggatccgaatctgacgccggaggtggtgaaagaacgattattgagcccgcgctttcgtaaccgtcagtttgctggattactgctcgatcaggcgtttctggctgggcttggcaattatttgcgggtggagatcctctggcaggttgggttgactggaaatcataaagcgaaagatctcaatgcggcgcaactggatgcactcgcacacgcgttactggagattcctcgattttcctacgctacgcgggggcaggtggatgagaataagcatcatggggcgctgtttcgctttaaggtttttcatcgagatggcgaaccgtgcgaacgttgtggcagcatcattgagaaaaccacgctgagttctcgcccgttttactggtgccctggctgccagcattaagcgctccgcttcggcgcataggtactaataaaccgcgcaatggcaggccctgtcagcaaaatactgaacaggcgtagggtttgcatcgccataatgagcgccatatcggcattgctccctgcggcgatgaccgccacggtatcaagcccgccggggctggtggcgaggtaggcagtcataaaatcaatgtgcataaaccgggtcagcccccacgccatacccgcacaaatagccagcagagcaaaaatgctcagcaggatttgcggtagcgggcgtagtgcccgcagtaagatttgtttatcgaaaccaagaccaatccgccagccaattgccatatacgccatcgccagcagccattccggtagttcgatggtgatgagctgaccagactggagcactgcgcccgccagcatcgggatgagcatcgtgccggaaggaagacgcagcaggcatcccactgtaccggcaacgaccgcgagcaaaatagtaagcaggagattaatgctcactggcgggaaccagacgatatgctggttaaccgcttcagcgttatcgcccagcatcatgcgggtgaccagaacagcggcccccgcgacgaacagcactcgcagatattgcataaacgccaccaggcgaatatctgcgccgtaatcttgcgccatagcgaccattgccgccgcgccgccaggagaggagccccaggcaccggtatttccaggcaaactgctatagcgcaccaataaccaacccacaatggcgctggaaagcagcgttaccagtaaaattgcaagcacgatcggccagttgacggccagggtggtgagaatgctaccagtgaggttttgcgcaatcatgcagccaagaatggcctgggcggcgagaaaagcagagcggggaagttgcagagtaattccgcgcatactaaagatgatcccggcgatcatcggcccaagtaatagcgccgccgggagatgtaccgcgaggaaaccaatagaaaggagaagacttagcacacataacattccccactgcaaaactggcatccttcgctccctcattattttctctttggtgtatcgatacagcataaagaaagctgggccaggaaaaaataacagcaatcaaggaaaaggggaaaatcagcaattttctgaaagagatgccctttccggcggcaaagggcatcatggtaaatcagttatagttaatcttaaaaagcaccactgtatcgaaggggccagcctcgatgggggtgcctggaatggagctaagttcagccgtataggttttttcgtagaccaacatgtcactggtgaaatcggcgtattcagcatatttattgaaggtataagggctggcgttttcatccagtaaacgtagcttcagaccattaccaatcaacaatgctttatcttcttcaaccaacgtttcttcggtataaaaggaggaactgactttaaatccgtcggtgcattgatcgttttggctcttggtcgttttaatactgaacgttttgctcattgtgtggcgacgtatatccagcaaattaaatttaccaaaatcaatcacctgtgtttccggactaatggaaaaattgacgctgcaatccagcacgcgaatgttttccagaccagtaatatgatatttcaggttttgggcagtagggtcttcgttaacgctaccggcaccgtcaaattgcacgacgatatagtcgctaagcgtactttgataatcatgcggcggcatttctcgtattttgacgtataaccgcatgcgagcgagaaaggtacggctcatatgaatattagcgggatcgccgctgcaaattttgttctgccatcccatcgcgatgatctgctcaggggtataaatatcaatgttcttactgtcgatacactggttagtgtcgatgcgactttttcccagactggcatcgtaatcgacaccgttgtatgtcacgccgagttgataataacgatcctgcacccccggataggggtttacccaggcgtagacatgctcgctttcaaagttgccgttggtattgttgtcacaatagacgggaattttaatatcgtcagattcccagatcttatcaccgggtttggcattgcctggtacagcaaacggttgaatcgcttcacttttttctactgcgccaccagatgtaccaaaatagcagttcagcgccattgcagacttcaacggcagaaataacaggcagatgacgagcaacaatcccttgccagcactcatttcgcctccactgcttgtaaacggcattgtccgctgcagttgagcgtcgtcatgcgtaatgcgccgtaatcatccatgtaaccgagataaaactggctgccgctataacttccggtgtttgtgttgaccgtactaaaaggtgcaaccatcacggttttgaagcctgggagaacgcctttttcatttctccccagataggcaatggtcagataatacgcggtaggatttttcagtgtcagttggttgccctgctggctgacctgtaactgcagttcgaccttttctcctgctttcttgcgtaatgcagccggtcgccagaacaatttaatacgactttgaatagcgacctgaagtatcgcatggtcgctgcttttatccggagcgggaggaatttcgcgcatattgtagaaaaatagcgtttcgcgatcgccaggtaattgtgtggtactggcttgtttcacaacccgcacctggcttgtcgctttcggttccagacgttgaatagggggcaaagcgaccagaagagcatcgcttttctcccctttttcattttctatccaggaataagcaagataaggcagtttgtcactttggttttcgatacgcaggctggtggctttgtcattggcgttaaacacaatgcgtgtgcgatcgggttgcaccgcagcattgcaacccaagctgatggttaacaacattaagggtaatcctttaataaatgtcattctcttttccttaattaatgacaaggtaaaatcaggcgtttggtcgtgtcttccagacgttctggcagatgaataatgcagctttgctcaccccagaccacggtaaacagttgattttcagcgacaccgcttaaccaggcatgtccttcctcgccaaccatacccacgctaatgccgctgtcatcctggcggatatccgcaccgaggggagggaactgaccgctggcgttgcgtatgatgacgttaacgtctttaccggaacgggaagccagacttttgtaacctatcgcgccttcaatccatgtttccttgatgacgttttctgcaactgttacgccgtcgggtaagtcattcatgttcaccgccacggtggaaggctggtaactggaaatcaacggcaccaccgcaatgccaaaatggttggtgtagtcgagattgccctgaaccggaatatctgccacgccatcggtgctgaccatcaggcgtggttcattggtggagctgcggcgatgaaatgctgcaccatattgggttgcggtgaaagaaccgctccagctgctgctgacggaactgtaatcactggcggcataggtaccagaaatatcccactcacccgcactactcaggtgctgatagttaccgctcacctgggctccattgtccggacgatcggattgcagtccggcagacatgccccagctattacgttcatccagcgtatcgttccagctcatgcggtgtatggtgctgtggctactgttttgcatgtcatagccaacccgaccaccgttaccgaaggggaggctaatgctcagataaatctggttgtcgcgatctttatcttcgtagtgggtcgtattgaaactcgtgctaatgctgatatctctccagtcaccaatatcaacattaaaacctgctgtgatgttggcggtcgtggaggcgtctgcattccaccaggtttgatgtagcaggttggcgtaaagattgaggtttagtggggtaatcggttggcccacggataagctgatcgtctgtttttcgtcctgcgcatcgctgtcgttgtatttgtgatccagatagttggcgtagctgtgaaaatgacgatcactgaagcgataagcggcgaggctaatcgtgctgttggtggcatccacttgtttgctgtaattaaaacggtagcttaagccccgctcgtcctgctgagtatcaaaatggctactggcccaggtgacatcaaaggacagtgcgccaagccacagcatattttgcccgatacccattgcggcagaatggtagtcatcatcagaaatcagcaggccgccgtacaggctggtgttactgagcatcccccaggaaacttcattgctaaaaaaggtttcattttcagtttgatgactcatggaaggccgtggctgacccgcggccaatttatagcgaacctgtccctggcgagtcaggaagggcgtgcttgctgcgctaacctggaaattgttcacccgaccatcttcttccgtcactttgacatccagcgtgccctgaacagactgattgaggtcatcaataataaacgggcctggcgggacttttttctggtaaatgacgcggccactttgactgatcgtcaccgtggcattggtctgtgcaataccgctaatttgtggggcgtagccacgcagctcccacggtaacattcgatcgtcactcgccagtgccgcgccggtataagaaaaaccatcgaaaatattggaactgaaatcggtttcgccgagggttaacttagagcctaattgcggtaatggacgaaaaagataggtgcggcttattccgccactctggtcatggttatcttcgctatcggtcttattaagctggtaatcactgcgtaagcgccatgccccggcgttaattccggcggtaccgtaggcattcaggttagtgctgctgctgccgtcctgtgggcggtagctgctggcaaacaagttgtaatccatcaggacaccggcaacaccttctttccatgtagaggggggagcccagttttcactgtgccacgccagccaggcttgcggaatactaatattcagttgctgattggcttgatcgaaattgaagagcatttcaggtcgggaactgaaatcaatacaccgatctatctgtggcaaggactgacggacatctggttttaaaccaaatttatcgaccagactatcattgatgcatggaatggttttgtcaccctttttttgccagttaattttttgcccattactgattttgttgttattcaccgcaacgctaacaaaatattcaccgggagcaatgactcctttttcctttaataaactaatatcaatgcggtcgcgcatacttttatcgagaacattcagattgaattcgaccgccattgcgcaaggcatcgccatgaccaggcaggatacaaaagagagtcgataaatattcacggtgtccatacctgataaatattttatgaaaggcggcgatgatgccgccaaaataatacttatttataatccagcacgtaggttgcgttagcggttacttcacctgccgtgacatcgactgcattatcaatttgttccatccaggcgaaaaagttcagcgtctgttcactactgcttgcatccaggtcaagatctggcgcggcactacctaatacgatgttaccgtcatttttgtccatcagtcgtacaccgaccccagttgcttcgcctgcactggtgttgctcaacaaaggcgtagcaccagttgtcttagccgtgctatcgaaggttacgccaactttggataccggcattccgctaccgttgtcagaagcaggcagatcacagttgatcaagcgaatgtcgacggccactttattgctatgatgctcccggtttatatgggttgtcgtgacttgtccaagatctatgtttttatcaatatcttctggatgaatttcacaaggtgcttcaataacctcccccttaaagtgaatttcgccagaaccttcatcagcagcataaacaggtgcagtgaacagcagagatacggccagtgcggccaatgttttttgtcctttaaacataacagagtcctttaaggatatagaataggggtatagctacgccagaatatcgtatttgattattgctagtttttagttttgcttaaaaatattgttagttttattaaatgcaaaactaaattattggtatcatgaatttgttgtatgatgaataaaatataggggggtatagatagacgtcattttcatagggttataaatgcgactaccatgaagtttttaattgaaagtattgggttgctgataatttgagctgttctattctttttaaatatctatataggtctgttaatggattttatttttacaattttttgtgtttaggcatataaaaatcaacccgccatatgaacggcgggttaaaatatttacaacttagcaatcaaccattaacgcttgatatcgcttttaaagtcgcgtttttcatatcctgtatacagctgacgcggacgggcaatcttcataccgtcactgtgcatttcgctccagtgggcgatccagccaacggtacgtgccattgcgaaaatgacggtgaacatggaagacggaatacccatcgctttcaggatgataccagagtagaaatcgacgttcgggtacagtttcttctcgataaagtacgggtcgttcagcgcgatgttttccagctccatagccacttccagcaggtcatccttcgtgcccagctctttcagcacttcatggcaggtttcacgcattacggtggcgcgcgggtcgtaatttttgtacacgcggtgaccgaagcccatcaggcggaaagaatcatttttgtctttcgcacgacgaacaaattccggaatgtgtttaacggagctgatttcttccagcattttcagcgccgcttcgttagcaccgccgtgcgcaggtccccacagactagcaatacctgctgcgatacaggcaaacgggttcgcaccgctagagccagcggtacgcacggtggaggtagaggcgttctgttcatggtcagcgtgcaggatcagaatacggtccatagcacgttccagaatcggattaacttcatacggttcgcacggcgtggagaacatcatattcaggaagttaccggcgtaggagagatcgttgcgcgggtaaacaaatggctgaccaatggaatacttgtaacacatcgcggccatggtcggcattttgctcagcaggcggaacgcggcaatttcacggtgacgaggattgttaacatccaggctgtcgtgatagaacgccgccagcgcgccggtaataccacacatgactgccattggatggctgtcgcgacggaaagcatggaacagacgggtaatctgctcgtggatcatggtatgacgggtcaccgtagttttaaattcgtcatactgttcctgagtcggtttttcaccattcagcaggatgtaacaaacttccaggtagttagaatcggtcgccagctgatcgatcgggaaaccgcggtgcagcaaaataccttcatcaccatcaataaaagtaattttagattcgcaggatgcggtactagtgaagcctgggtcaaaggtgaacacacctttactaccgagagtacggatatcaataacatcttgacccagcgtgcctttcagcacatccagttcaacagctgtatccccgttgagggtgagttttgcttttgtatcagccatttaaggtctccttagcgccttattgcgtaagactgccggaacttaaatttgccttcgcacatcaacctggctttacccgttttttatttggctcgccgctctgtgaaagaggggaaaacctgggtacagagctctgggcgcttgcaggtaaaggatccattgatgacgaataaatggcgaatcaagtacttagcaatccgaattattaaacttgtctaccactaataactgtcccgaatgaattggtcaatacttccacactgttacataagttaatcttaggtgaaataccgacttcataacttttacgcattatatgcttttcctggtaatgtttgtaacaactttgttgaatgattgtcaaattagatgattaaaaattaaataaatgttgttatcgtgacctggatcactgttcaggataaaacccgacaaactatatgtaggttaattgtaatgattttgtgaacagcctatactgccgccaggtctccggaacaccctgcaatcccgagccacccagcgttgtaacgtgtcgttttcgcatctggaagcagtgttttgcatgacgcgcagttatagaaaggacgctgtctgacccgcaagcagaccggaggaaggaaatcccgacgtctccaggtaacagaaagttaacctctgtgcccgtagtccccagggaataataagaacagcatgtgggcgttattcatgataagaaatgtgaaaaaacaaagacctgttaatctggacctacagaccatccggttccccatcacggcgatagcgtccattctccatcgcgtttccggtgtgatcacctttgttgcagtgggcatcctgctgtggcttctgggtaccagcctctcttcccctgaaggtttcgagcaagcttccgcgattatgggcagcttcttcgtcaaatttatcatgtggggcatccttaccgctctggcgtatcacgtcgtcgtaggtattcgccacatgatgatggattttggctatctggaagaaacattcgaagcgggtaaacgctccgccaaaatctcctttgttattactgtcgtgcttagtcttctcgcaggagtcctcgtatggtaagcaacgcctccgcattaggacgcaatggcgtacatgatttcatcctcgttcgcgctaccgctatcgtcctgacgctctacatcatttatatggtcggttttttcgctaccagtggcgagctgacatatgaagtctggatcggtttcttcgcctctgcgttcaccaaagtgttcaccctgctggcgctgttttctatcttgatccatgcctggatcggcatgtggcaggtgttgaccgactacgttaaaccgctggctttgcgcctgatgctgcaactggtgattgtcgttgcactggtggtttacgtgatttatggattcgttgtggtgtggggtgtgtgatgaaattgccagtcagagaatttgatgcagttgtgattggtgccggtggcgcaggtatgcgcgcggcgctgcaaatttcccagagcggccagacctgtgcgctgctctctaaagtcttcccgacccgttcccataccgtttctgcgcaaggcggcattaccgttgcgctgggtaatacccatgaagataactgggaatggcatatgtacgacaccgtgaaagggagcgactatatcggtgaccaggacgcgattgaatatatgtgtaaaaccgggccggaagcgattctggaactcgaacacatgggcctgccgttcagccgtctcgatgatggtcgtatctatcaacgtccgtttggcggtcagagcaaaaacttcggcggcgagcaggcggcacgcactgcggcagcagctgaccgtaccggtcacgcactgttgcacacgctttatcagcagaacctgaaaaaccacaccaccattttctccgagtggtatgcgctggatctggtgaaaaaccaggatggcgcggtggtgggttgtaccgcactgtgcatcgaaaccggtgaagtggtttatttcaaagcccgcgctaccgtgctggcgactggcggagcagggcgtatttatcagtccaccaccaacgcccacattaacaccggcgacggtgtcggcatggctatccgtgccggcgtaccggtgcaggatatggaaatgtggcagttccacccgaccggcattgccggtgcgggcgtactggtcaccgaaggttgccgtggtgaaggcggttatctgctgaacaaacatggcgaacgttttatggagcgttatgcgccgaacgccaaagacctggcgggccgtgacgtggttgcgcgttccatcatgatcgaaatccgtgaaggtcgcggctgtgatggtccgtgggggccacacgcgaaactgaaactcgatcacctgggtaaagaagttctcgaatcccgtctgccgggtatcctggagctttcccgtaccttcgctcacgtcgatccggtgaaagagccgattccggttatcccaacctgtcactacatgatgggcggtattccgaccaaagttaccggtcaggcactgactgtgaatgagaaaggcgaagatgtggttgttccgggactgtttgccgttggtgaaatcgcttgtgtaagcgtacacggcgctaaccgtctgggcggcaacagcctgctggacctggtggtctttggtcgcgcggcaggtctgcatctgcaagagtctatcgccgagcagggcgcactgcgcgatgccagcgagtctgatgttgaagcgtctctggatcgcctgaaccgctggaacaataatcgtaacggtgaagatccggtggcgatccgtaaagcgctgcaagaatgtatgcagcataacttcagcgtcttccgtgaaggtgatgcgatggcgaaagggcttgagcagttgaaagtgatccgcgagcgtctgaaaaatgcccgtctggatgacacttccagcgagttcaacacccagcgcgttgagtgcctggaactggataacctgatggaaacggcgtatgcaacggctgtttctgccaacttccgtaccgaaagccgtggcgcgcatagccgcttcgacttcccggatcgtgatgatgaaaactggctgtgccactccctgtatctgccagagagcgaatccatgacgcgccgaagcgtcaacatggaaccgaaactgcgcccggcattcccgccgaagattcgtacttactaatgcggagacaggaaaatgagactcgagtttagtatttatcgctataacccggatgttgatgatgctccgcgtatgcaggattacaccctggaagcggatgaaggtcgcgacatgatgctgctggatgcgcttatccagctaaaagagaaagatcccagcctgagcttccgccgctcctgccgtgaaggtgtgtgcggttccgacggtctgaacatgaacggcaagaatggtctggcctgtattaccccgattagcgcactcaaccagccgggcaagaagattgtgattcgcccgctgccaggtttaccggtgatccgcgatttggtggtagacatgggacaattctatgcgcaatatgagaaaattaagccttacctgttgaataatggacaaaatccgccagctcgcgagcatttacagatgccagagcagcgcgaaaaactcgacgggctgtatgaatgtattctctgcgcatgttgtagtacctcttgtccgtctttctggtggaatcccgataagtttatcggcccggcaggcttgttagcggcatatcgtttcctgattgatagccgtgataccgagactgacagccgcctcgacggtttgagtgatgcattcagcgtattccgctgtcacagcatcatgaactgcgtcagtgtatgtccgaaggggctgaacccgacgcgcgccatcggccatatcaagagcatgttgttgcaacgtaatgcgtaaaccgtaggcctgataagacgcgcaagcgtcgcatcaggcaaccagtgccggatgcggcgtgaacgccttatccggcctacaagtcattacccgtaggcctgataagcgcagcgcatcaggcgtaacaaagaaatgcaggaaatctttaaaaactgcccctgacactaagacagtttttaaaggttccttcgcgagccactacgtagacaagagctcgcaagtgaaccccggcacgcacatcactgtgcgtggtagtatccacggcgaagtaagcataaaaaagatgcttaagggatcacgatgcagaacagcgctttgaaagcctggttggactcttcttacctctctggcgcaaaccagagctggatagaacagctctatgaagacttcttaaccgatcctgacagcgttgacgctaactggcgtaacacgttccagcagttacctggtacgggagtcaaaccggatcaattccactctcaaacgcgtgaatatttccgccgcctggcgaaagacgctagtcgttactctagtacgatctccgaccctgacaccaatgtgaagcaggttaaagtcctgcagctcattaacgcataccgcttccgtggtcaccagcatgcgaatctcgatccgctgggactgtggcagcaagataaagtggccgatctggatccgtctttccacgatctgaccgaagcagacttccaggagaccttcaacgtcggtagttttgccagcggcaaagaaaccatgaaactcggcgagctgctggaagccctcaagcaaacctactgcggcccgattggtgccgagtatatgcacattaccagcaccgaagaaaaacgctggatccaacagcgtatcgagtctggtcgcgcgactttcaatagcgaagagaaaaaacgcttcttaagcgaactgaccgccgctgaaggtcttgaacgttacctcggcgcaaaattccctggcgcaaaacgcttcagcctggaaggcggtgacgcgttaatcccgatgcttaaagagatgatccgccacgctggcaacagcggcacccgcgaagtggttctcgggatggcgcaccgtggtcgtctgaacgtgctggtgaacgtgctgggtaaaaaaccgcaagacttgttcgacgagttcgccggtaaacataaagaacacctcggcacgggtgacgtgaaataccacatgggcttcagctctgacttccagaccgatggcggcctggtgcacctggcgctggcgtttaacccgtctcaccttgagattgtaagcccggtagttatcggttctgttcgtgcccgtctggacagacttgatgagccgagcagcaacaaagtgctgccaatcaccatccacggtgacgccgcagtgaccgggcagggcgtggttcaggaaaccctgaacatgagcaaagcgcgtggttatgaagttggcggtacggtacgtatcgttatcaacaaccaggttggtttcaccacctctaatccgctggatgcccgttctacgccgtactgtactgatatcggtaagatggttcaggccccgattttccacgttaacgcggacgatccggaagccgttgcctttgtgacccgtctggcgctcgatttccgtaacacctttaaacgtgatgtcttcatcgacctggtgtgctaccgccgtcacggccacaacgaagccgacgagccgagcgcaacccagccgctgatgtatcagaaaatcaaaaaacatccgacaccgcgcaaaatctacgctgacaagctggagcaggaaaaagtggcgacgctggaagatgccaccgagatggttaacctgtaccgcgatgcgctggatgctggcgattgcgtagtggcagagtggcgtccgatgaacatgcactctttcacctggagcccgtacctcaaccacgaatgggacgaagagtacccgaacaaagttgagatgaagcgcctgcaggagctggcgaaacgcatcagcacggtgccggaagcagttgaaatgcagtctcgcgttgccaagatttatggcgatcgccaggcgatggctgccggtgagaaactgttcgactggggcggtgcggaaaacctcgcttacgccacgctggttgatgaaggcattccggttcgcctgagcggtgaagactccggtcgcggtaccttcttccaccgccacgcggtgatccacaaccagtctaacggttccacttacacgccgctgcaacatatccataacgggcagggcgcgttccgtgtctgggactccgtactgtctgaagaagcagtgctggcgtttgaatatggttatgccaccgcagaaccacgcactctgaccatctgggaagcgcagttcggtgacttcgccaacggtgcgcaggtggttatcgaccagttcatctcctctggcgaacagaaatggggccggatgtgtggtctggtgatgttgctgccgcacggttacgaagggcaggggccggagcactcctccgcgcgtctggaacgttatctgcaactttgtgctgagcaaaacatgcaggtttgcgtaccgtctaccccggcacaggtttaccacatgctgcgtcgtcaggcgctgcgcgggatgcgtcgtccgctggtcgtgatgagcccgaaatccctgctgcgtcatccgctggcggtttccagcctcgaagaactggcgaacggcaccttcctgccagccatcggtgaaatcgacgagcttgatccgaagggcgtgaagcgcgtagtgatgtgttctggtaaggtttattacgacctgctggaacagcgtcgtaagaacaatcaacacgatgtcgccattgtgcgtatcgagcaactctacccgttcccgcataaagcgatgcaggaagtgttgcagcagtttgctcacgtcaaggattttgtctggtgccaggaagagccgctcaaccagggcgcatggtactgcagccagcatcatttccgtgaagtgattccgtttggggcttctctgcgttatgcaggccgcccggcctccgcctctccggcggtagggtatatgtccgttcaccagaaacagcaacaagatctggttaatgacgcgctgaacgtcgaataaataaaggatacacaatgagtagcgtagatattctggtccctgacctgcctgaatccgtagccgatgccaccgtcgcaacctggcataaaaaacccggcgacgcagtcgtacgtgatgaagtgctggtagaaatcgaaactgacaaagtggtactggaagtaccggcaagtgcagacggcattctggatgcggttctggaagatgaaggtacaacggtaacgtctcgtcagatccttggtcgcctgcgtgaaggcaacagcgccggtaaagaaaccagcgccaaatctgaagagaaagcgtccactccggcgcaacgccagcaggcgtctctggaagagcaaaacaacgatgcgttaagcccggcgatccgtcgcctgctggctgaacacaatctcgacgccagcgccattaaaggcaccggtgtgggtggtcgtctgactcgtgaagatgtggaaaaacatctggcgaaagccccggcgaaagagtctgctccggcagcggctgctccggcggcgcaaccggctctggctgcacgtagtgaaaaacgtgtcccgatgactcgcctgcgtaagcgtgtggcagagcgtctgctggaagcgaaaaactccaccgccatgctgaccacgttcaacgaagtcaacatgaagccgattatggatctgcgtaagcagtacggtgaagcgtttgaaaaacgccacggcatccgtctgggctttatgtccttctacgtgaaagcggtggttgaagccctgaaacgttacccggaagtgaacgcttctatcgacggcgatgacgtggtttaccacaactatttcgacgtcagcatggcggtttctacgccgcgcggcctggtgacgccggttctgcgtgatgtcgataccctcggcatggcagacatcgagaagaaaatcaaagagctggcagtcaaaggccgtgacggcaagctgaccgttgaagatctgaccggtggtaacttcaccatcaccaacggtggtgtgttcggttccctgatgtctacgccgatcatcaacccgccgcagagcgcaattctgggtatgcacgctatcaaagatcgtccgatggcggtgaatggtcaggttgagatcctgccgatgatgtacctggcgctgtcctacgatcaccgtctgatcgatggtcgcgaatccgtgggcttcctggtaacgatcaaagagttgctggaagatccgacgcgtctgctgctggacgtgtaatagtttaagtttcacctgcactgtagaccggataaggcattatcgccttctccggcaattgaagcctgatgcgacgctgacgcgtcttatcaggcctacgggaccaccaatgtaggtcggataaggcgcaagcgccgcatccgacaagcgatgcctgatgtgacgtttaacgtgtcttatcaggcctacgggtgaccgacaatgcccggaagcgatacgaaatattcggtctacggtttaaaagataacgattactgaaggatggacagaacacatgaacttacatgaatatcaggcaaaacaactttttgcccgctatggcttaccagcaccggtgggttatgcctgtactactccgcgcgaagcagaagaagccgctagtaaaatcggtgccggtccgtgggtagtgaaatgtcaggttcacgctggtggccgcggtaaagcgggcggtgtgaaagttgtaaacagcaaagaagacatccgtgcttttgcagaaaactggctgggcaagcgtctggtaacgtatcaaacagatgccaatggccaaccggttaaccagattctggttgaagcagcgaccgatatcgctaaagagctgtatctcggtgccgttgttgaccgtagttcccgtcgtgtggtctttatggcctccaccgaaggcggcgtggaaatcgaaaaagtggcggaagaaactccgcacctgatccataaagttgcgcttgatccgctgactggcccgatgccgtatcagggacgcgagctggcgttcaaactgggtctggaaggtaaactggttcagcagttcaccaaaatcttcatgggcctggcgaccattttcctggagcgcgacctggcgttgatcgaaatcaacccgctggtcatcaccaaacagggcgatctgatttgcctcgacggcaaactgggcgctgacggcaacgcactgttccgccagcctgatctgcgcgaaatgcgtgaccagagccaggaagatccgcgtgaagcacaggctgcacagtgggaactgaactacgttgcgctggacggtaacatcggttgtatggttaacggcgcaggtctggcgatgggtacgatggacatcgttaaactgcacggcggcgaaccggctaacttccttgacgttggcggcggcgcaaccaaagaacgtgtaaccgaagcgttcaaaatcatcctctctgacgacaaagtgaaagccgttctggttaacatcttcggcggtatcgttcgttgcgacctgatcgctgacggtatcatcggcgcggtagcagaagtgggtgttaacgtaccggtcgtggtacgtctggaaggtaacaacgccgaactcggcgcgaagaaactggctgacagcggcctgaatattattgcagcaaaaggtctgacggatgcagctcagcaggttgttgccgcagtggaggggaaataatgtccattttaatcgataaaaacaccaaggttatctgccagggctttaccggtagccaggggactttccacagtgaacaggccattgcatacggcactaaaatggttggcggcgtaaccccaggtaaaggcggcaccacccacctcggcctgccggtgttcaacaccgtgcgtgaagccgttgctgccactggcgctaccgcttctgttatctacgtaccagcaccgttctgcaaagactccattctggaagccatcgacgcaggcatcaaactgattatcaccatcactgaaggcatcccgacgctggatatgctgaccgtgaaagtgaagctggatgaagcaggcgttcgtatgatcggcccgaactgcccaggcgttatcactccgggtgaatgcaaaatcggtatccagcctggtcacattcacaaaccgggtaaagtgggtatcgtttcccgttccggtacactgacctatgaagcggttaaacagaccacggattacggtttcggtcagagcacctgtgtcggtatcggcggtgacccgatcccgggctctaactttatcgacattctcgaaatgttcgaaaaagatccgcagaccgaagcgatcgtgatgatcggtgagatcggcggtagcgctgaagaagaagcagctgcgtacatcaaagagcacgttaccaagccagttgtgggttacatcgctggtgtgactgcgccgaaaggcaaacgtatgggccacgcgggtgccatcattgccggtgggaaagggactgcggatgagaaattcgctgctctggaagccgcaggcgtgaaaaccgttcgcagcctggcggatatcggtgaagcactgaaaactgttctgaaataaatatctgtaataagaaatagccctcgccgcttccctctacaggaatggcgaagggctgtcggtttcgacatggttggccatcgtatgatggccttttttgtgcttatcggctactttttcgctgcgctatcagggtaaatttatagtcatcggtattaaaagcgttgcggctatattcaaacacccgaccatcaactaaatatccacggcttactttttcaagaatcggctttgtctggctgatattaagcagacggctcatctcttcggttggcatcagaggaatgatttcctgttcgctacgatcgataaccattttcttcacttcttcgataaagtgatatttgctattttccatgacctgccaggtgagatccgggaacaacgcaagcggcatccaggtttcttccagcgccattggcttttgcttgcgatagcgcacgcgcttcacatgccacacacgatcctgcggggtgatttgtagctgttgctgaagaaaatcgtcagccggaatcacttcgaatatcagaacttcactgtgtgtatcgacgtgacggtcgctcagtttttcatcaaaactggttaactgaaaaatatcgtaattgacccgctcttctttgacgtaagtcccgctgccctgaatgctttcgaggatctgctgctcgactagctggcgcaaagcctgacgcaccgtaacccggctgacgccaaactctgtttgtagcgcactttcagtgggtaacgcatcgccaggtttaagctcgccacgcgcaatttgttcacgaatgcgatcggcaatctgccggtataagggcttgtgtcccatttttagtatctcattaatacgaatttaaccattatgcccgataaattcatcctgtaaataatacaaatacaatacaaataatttcaatcaagtgaaattgatcacataatggtattgttttatcgggcacactggcgcgactataaaaacgatcaagtgaggatcatgatgaatctgacgactctgacccaccgcgatgcgttgtgtctgaatgcgcgctttaccagccgtgaagaggccatccacgcgttgactcaacgtcttgctgctctggggaaaatttccagtactgagcaatttctggaagaagtgtatcgccgtgaaagccttggcccgaccgccttaggtgaagggttggctgtgccgcatggcaaaactgctgcggtaaaagaagcggcgtttgcggtcgccacactcagcgagccgcttcagtgggaaggcgttgatggcccggaagcagttgatttagtggtgctgctggcgattccccccaatgaagcgggtactacgcatatgcaactgctgacagcgctgaccacgcgccttgcggatgatgagattcgggcgcgtatacagagcgcgacgacgcctgatgagttgctcagcgcgctggatgacaagggaggcacgcaaccttctgcctctttttccaacgcgccaactatcgtctgcgtaacggcctgtccggcgggtattgctcacacctatatggctgcggaatatctggaaaaagccggacgcaaactcggcgtaaatgtttacgttgaaaaacaaggcgctaacggcattgaagggcgtttaacggcggatcaactcaatagtgcaaccgcctgtatttttgcggctgaagtcgccatcaaggagagtgagcgttttaatggcattcccgcgcttagtgtgcctgttgccgagccgattcgccatgcagaagcgttgatccaacaagcgcttaccctcaagcgtagcgatgagacgcgtaccgtacagcaagatacgcaaccggtgaaaagtgtcaaaacggagctgaaacaggcactgttgagcggaatctcttttgccgtaccgttgattgtcgcggggggcacggtgctggcggtcgcggtattactgagccaaatcttcgggctacaagatctgtttaatgaagaaaactcctggctgtggatgtaccgcaagctgggcggcgggctgctcggaattttgatggtaccggtgctcgcggcctataccgcctattctctggcagataaaccggcgttagcgccaggctttgcggctggacttgccgccaacatgatcggctccgggtttctcggcgcggtcgttggcggattgatagccggttacttgatgcgctgggtgaaaaatcacttgcgtcttagcagtaaattcaatggattcctgactttttatctctacccggtgctcggtacgttgggagcgggcagtctgatgctgtttgtggtgggggaacctgtcgcctggatcaataacagccttaccgcctggctgaacggtctgagtggaagtaacgcgctgttgctgggtgccattctcggttttatgtgttcctttgaccttggagggccagtgaataaagccgcttatgcattctgcctgggcgcaatggcgaacggcgtttacggcccgtatgccattttcgcctccgtcaaaatggttagcgcatttaccgtaaccgcttccacgatgctcgcaccgcgcctgtttaaagagtttgaaattgagaccgggaaatccacctggctgttagggctggcaggtattaccgaaggggcgatcccgatggcgattgaagatccgctgcgggttattggtagctttgtgctgggctctatggtaacgggcgctattgtcggtgcgatgaatatcggccttagcacacccggtgccggcattttcagcctctttttacttcatgataatggcgcgggcggtgttatggcggcaattggctggtttggcgcggcattggtgggggctgcaatcagcactgcaattctcctgatgtggcggcgtcacgcggttaagcatggcaactatctgactgatggcgtaatgccataaacaaaaaggaaacgacgatgaaagcagtatctcgcgttcacatcaccccgcatatgcactgggatcgagagtggtatttcaccaccgaagagagtcgtattctgctggtcaataatatggaagagatcctgtgccgactggaacaggacaacgaatacaaatattacgtactcgacgggcaaacggcgatcctcgaagattatttcgcggtgaaaccggaaaacaaagaccgtgtgaagaaacaggtagaagccggcaagttgattatcggcccctggtatacccagaccgataccacgattgtttctgcggaatccatcgtccgtaatctgatgtacggaatgcgtgactgcctcgcgtttggcgagccgatgaaaataggttatttaccagattcctttggcatgtccgggcaactgccgcatatctacaatggatttggcattacccgcaccatgttctggcgcggatgtagcgagcgccacggtactgataaaaccgagtttttgtggcaaagcagtgacggtagcgaagtgacggcgcaggtgctgccgctgggctacgccatcggtaagtacttacctgccgacgaaaacggattacgtaaacgcctcgacagttattttgacgtgctggaaaaagcgtctgtaaccaaagagattttgctgccgaatgggcatgaccagatgccattgcagcaaaatatcttcgaagtgatggataagctacgtgagatctaccctcaacgtaagtttgtgatgagccgctttgaagaggtatttgagaagatcgaagcgcagcgagataatctggcaaccctgaaaggggaatttattgatggcaaatatatgcgcgtgcatcgcaccatcggttctacgcgtatggatatcaaaattgcccacgcgcgtattgaaaataagattgttaatctgctggaaccgctggcaacactggcctggacgttgggttttgaataccaccacggcttgctggagaaaatgtggaaagagatcttaaaaaatcatgcccacgacagtatcggctgctgctgtagtgacaaagttcatcgcgaaatcgtcgcccgcttcgaactggctgaagacatggcggataatctgattcgtttctacatgcgcaaaattgccgacaacatgccgcagagcgacgccgacaaactcgtcctgtttaacctgatgccctggccgcgtgaagaagttatcaacaccactgtgcggctgcgcgccagccagtttaatttgcgggacgatcgcggtcagcctgtaccgtattttattcgccatgcccgtgagatcgatccaggcctaatcgatcggcaaatagttcattacggtaattacgatccctttatggagtttgatatacagatcaaccagattgtcccttctatgggctatcgcacgctttatatcgaagcgaatcagcctggcaacgtaattgcggcaaaaagtgacgctgaagggatactggaaaatgctttctggcaaattgcgctcaatgaggatggttctctgcaactggtagataaagacagcggtgtgcgctatgaccgggtattgcaaattgaagaaagctctgatgatggtgatgaatatgactatagtcccgcaaaagaagagtgggtaattaccgcagcgaacgcgaaaccgcaatgcgatattattcatgaagcctggcagagcagggctgttatccgctatgacatggcagtgccgctcaatttgagtgaacgcagcgcccggcaatccactggcagagtaggggtggtgttggttgtcactcttagtcataacagcaggcgtattgatgtggatatcaatcttgataaccaggctgacgatcatcgccttcgtgtcctggtccctacaccttttaacaccgacagtgttctggcagatacgcagtttggtagcctaacgcgccccgtgaacgacagtgcaatgaacaactggcagcaagaaggctggaaagaagcgccggttccggtatggaatatgctcaactatgttgccttacaggaagggcgtaacggcatggctgtctttagcgaagggttacgtgaatttgaagtcatcggtgaagagaagaaaacctttgccattacgttgctgcgtggcgtgggcttactgggcaaagaagatctgcttttaaggcctgggcggcctagcggaattaaaatgccagtcccggacagtcaactacgtggtctgctttcttgtcgcctaagtttattgagttataccggtacgccaaccgccgctggtgtagctcagcaggcgcgagcatggctgactccagtacagtgttacaacaaaatcccatgggatgtgatgaagctcaacaaagccggattcaacgtgccggaaagttatagtttgttgaaaatgcccccagtgggatgcctgataagcgcacttaagaaagctgaagaccgacaagaagtgattttacggctgtttaatccggctgaaagtgcaacctgtgatgcgactgttgctttcagtcgcgaggtgatttcttgcagtgaaacgatgatggatgaacacattaccaccgaggaaaatcaaggtagtaatctaagcgggccttttttacccggccagagtcggacgttcagttaccggcttgcctgaatagcaatcaaaccgaagccacatatgcgcggccagattgttgacaaagggcgctttgttcatgccggatacggcatgaacgctttattcggtctacaaaagcaggcaaattcaatatattgcagagatgatgtagacactggcaagcgtagcgcatcaggtaattttgcgtttatcttcactctcaagccacgtatatgtggctttatttttaacaaaataataaccctgggtgagttaattataatataattataagttaactaaatgttaatattggcggggtggatttatgcctttattagtaatcctgaaactctgcgtcgtattagccagtgaccaaaaaaagaattaaggtcaaccgtgctgtttttgcttcgtctctttttatctttaattgccaaccgaaactaatttcagccttataactcacacattttaaacataaatgtcactaaagttaccttattgaaacatgattaacataatttgtaggaattgatatttatcaatgtataagtcttggaaatgggcatcaaaaagagataaattgttctcgatcaaattggctgaaaggcggtaatttagctataaattgatcaccgtcgaaaaatgcaaatttgcttcaacaaaaacctgtttattgtaaggattttgcggcgtaatatatacgtgggatcaatttgagtttttattaacatgtttgcaacctttctttacgccgtttttgtgtgcattcacatggtatgatgaaagtgttcaaacaaatttctattggggcatgcgtgtgaccctttctaacggggttcactctcggagtcttcatgcgatgagcaaggagtcatgatgttagatatagtcgaactgagccgcttacagtttgccttgaccgcgatgtaccacttcctttttgtgccactgacgctcggtatggcgttcctgctggccattatggaaacggtctacgtcctctccggcaaacagatttataaagatatgaccaagttctggggcaagttgtttggtatcaacttcgctctgggtgtggctaccggtctgaccatggagttccagttcgggactaactggtcttactattcccactatgtaggggatatcttcggtgcgccgctggcaatcgaaggtctgatggccttcttcctcgaatccacctttgtaggtctgttcttcttcggttgggatcgtctgggtaaagttcagcatatgtgtgtcacctggctggtggcgctcggtagtaacctgtccgcactgtggattctggttgcgaacggctggatgcaaaacccaatcgcgtccgatttcaactttgaaactatgcgtatggagatggtgagcttctccgagctggtgcttaacccggttgctcaggtgaaattcgttcacactgtagcgtctggttatgtgactggcgcgatgttcatcctcggtatcagcgcatggtatatgctgaaaggtcgtgacttcgccttcgctaaacgctcctttgctatcgctgccagcttcggtatggctgctgttctgtctgttattgttctgggtgatgaatccggctacgaaatgggcgacgtgcagaaaaccaaactggctgctattgaagccgagtgggaaacgcaacctgcgcctgctgcctttactctgttcggcattcctgatcaggaagaggagacgaacaaatttgcgattcagatcccttacgcactgggcatcattgcaacgcgttccgtggataccccggttatcggcctgaaagagctgatggtgcagcatgaagaacgcattcgtaacgggatgaaggcgtactctctgctcgaacaactgcgttctggttctaccgaccaggcggttcgtgaccagttcaatagcatgaagaaagacctcggttacggtctgctgctgaaacgctatacgccaaacgtggctgatgcgactgaagcgcagattcaacaggcaaccaaagactccatcccgcgtgtagcgccgctgtactttgcgttccgtatcatggtggcgtgtggcttcctgcttctggcaatcatcgcgctctctttctggagtgtcatccgcaaccgcattggcgagaaaaaatggcttctgcgcgccgcgctgtacggtattccgctgccgtggattgctgtagaagcgggctggttcgtggctgaatatggccgccaaccgtgggctatcggtgaagtgctgccgacagctgtggcgaacagcagtctgaccgcaggcgatctcatcttcagtatggtgctgatttgcggcctgtataccctgttcctggtggcagaattgttcttaatgttcaagtttgcacgcctcggcccaagcagcctgaaaaccggtcgctatcactttgagcagtcttccacgactactcagccggcacgctaagacaggagtcgtcaaatgatcgattatgaagtattgcgttttatctggtggctgctggttggcgttctgctgattggttttgcagtcactgacggtttcgacatgggggtgggcatgctcacccgtttcctcggtcgtaacgacaccgagcgtcgaattatgattaactccattgcaccacactgggacggtaaccaggtttggctgatcaccgcgggcggcgcactctttgctgcctggccgatggtctatgccgctgcgttctccggcttctatgtggcgatgatcctcgtgctggcgtctttgttcttccgtccggtcggttttgactaccgctccaagattgaagaaacccgctggcgtaacatgtgggactggggcatcttcattggtagcttcgttccgccgctggtaattggtgtagcgttcggtaacctgttgcagggcgtaccgttcaacgttgatgaatatctgcgtctgtactacaccggtaacttcttccagttgcttaacccgttcggcctgctggcaggcgtggtgagcgtagggatgatcattactcagggcgcaacctatctgcaaatgcgtaccgtgggcgaactgcacctgcgtacccgtgcaacggctcaggtggctgcgctggtgacactggtctgtttcgcactggctggcgtatgggtgatgtacggtatcgatggttatgtcgtgaaaagcacaatggaccattacgcagcctctaacccactgaataaagaagtggttcgtgaagctggcgcatggctggttaacttcaacaacacgccaattctgtgggctattccggcactgggtgtggttctgccgctgctgaccatcctgactgcacgtatggataaagccgcgtgggcgtttgtgttctcctccctgacgctggcctgcatcatcctgacagccggtatcgcaatgttcccgtttgtgatgccgtccagcaccatgatgaacgcaagtctgacaatgtgggatgcaacttccagccagctgacgcttaacgtcatgacctgggttgcggtggttctggtaccgatcattctgctctacaccgcctggtgttactggaaaatgttcggtcgtatcaccaaagaagatattgaacgtaacacccactctctgtactaagtaaggagctaaaaatgtggtatttcgcatggattctgggaacgcttcttgcctgtagctttggggtaatcaccgcgctggcgcttgaacacgtcgaaagtggcaaagccggtcaagaagacatctgatgagtaagattatcgcgactttgtatgcggtaatggacaagcgccccctgcgggcgctttccttcgtgatggcgcttctgttagcaggatgtatgttttgggacccatctcgttttgccgcgaagaccagtgaactggaaatctggcatggtttattgctgatgtgggccgtctgtgctggtgtgattcacggcgtgggctttcgtccgcagaaggttctttggcaagggattttttgcccattgcttgccgatattgttctcattgtcgggctgattttcttcttcttttaaatcagaattctctttaaaaaattatgggccgctccaggcccataaatttttacgctcccttaacttgccctcattcccaaacctcaatcgcgcgcgtatagtagcagcgtttaaaagctctaacttttgttgcattaccgggatgtaaagtgaatacaacgctgtttcgatggccggttcgcgtctactatgaagataccgatgccggtggtgtggtgtaccacgccagttacgtcgctttttatgaaagagcacgcacagagatgctgcgtcatcatcacttcagtcagcaggcgctgatggctgaacgcgttgcctttgtggtacgtaaaatgacggtggaatattacgcacctgcgcggctcgacgatatgctcgaaatacagactgaaataacaagtatgcgtggcacctctttggttttcacgcaacgtattgtcaacgccgagaatactttgctgaatgaagcagaggttctggttgtttgcgttgacccactcaaaatgaagcctcgtgcgcttcccaagtctattgtcgcggagtttaagcagtgactgacatgaatatccttgatttgttcctgaaggctagccttctggttaaacttatcatgttgattttgattggttttagtatcgcatcttgggccattattatccagcggacccgtattcttaacgcagcggcgcgcgaagccgaagcgtttgaagataaattctggtctggaatcgaactctctcgcctctatcaagagagccaggggaaacgggataatctgactggtagcgaacaaatcttttacagcgggttcaaagagtttgtgcgcctgcatcgtgccaatagccatgcgccggaagccgtagtggaaggggcgagccgtgctatgcgtatctccatgaaccgtgaacttgaaaatctggaaacgcacattccgttcctcggtacggttggctccatcagcccgtatattggtctgtttggtacggtctgggggatcatgcacgcctttatcgccctcggggcggtaaaacaagcaacactgcaaatggttgcgcccggtatcgcagaagcgttgattgcgactgcaattggtctgtttgccgctatcccggcagttatggcctacaaccgcctcaaccagcgcgtaaacaaactggaactgaattacgacaactttatggaagagtttaccgcgattctgcaccgccaggcgtttaccgttagcgagagcaacaaggggtaagccatggccagagcgcgtggacgaggtcgtcgcgatctcaagtccgaaatcaacattgtaccgttgctggacgtactgctggtgctgttgctgatctttatggcgacagcgcccatcatcacccagagcgtggaggtcgatctgccagacgctactgaaagtcaggcggtgagcagtaacgataatccgccagtgattgttgaagtgtctggtattggtcagtacaccgtggtggttgagaaagatcgcctggagcgtttaccaccagagcaggtggtggcggaagtgtccagccgtttcaaggccaacccgaaaacggtctttctgatcggtggcgcaaaagatgtgccttacgatgaaataattaaagcactgaacttgttacatagtgcgggtgtgaaaagcgttggtttaatgacgcagcctatctaaacatctgcgtttcccttgcttgaaagagagcgggtaacaggcgaacagtttttggaaaccgagagtgagtaaggcaaccgaacaaaacgacaagctcaagcgggcgataattattagtgcagtgctgcatgtcatcttatttgcggcgctgatctggagtagcttcgatgagaatatagaagctagtgccggaggcggcggtggtagctccatcgacgctgtcttggttgatagtggtgcggtagttgagcagtacaaacgcatgcaaagccaggaaagtagcgcgaagcgttctgatgaacagcgcaagatgaaggaacagcaggctgctgaagaactgcgtgagaaacaagcggctgaacaggaacgcctgaagcaacttgagaaagagcggttagcggctcaggagcagaaaaagcaggctgaagaagccgcaaaacaggccgagttaaagcagaagcaagctgaagaggcggcagcgaaagcggcggcagatgctaaagcgaaggccgaagcagatgctaaagctgcggaagaagcagcgaagaaagcggctgcagacgcaaagaaaaaagcagaagcagaagccgccaaagccgcagccgaagcgcagaaaaaagccgaggcagccgctgcggcactgaagaagaaagcggaagcggcagaagcagctgcagctgaagcaagaaagaaagcggcaactgaagctgctgaaaaagccaaagcagaagctgagaagaaagcggctgctgaaaaggctgcagctgataagaaagcggcagcagagaaagctgcagccgacaaaaaagcagcagaaaaagcggctgctgaaaaggcagcagctgataagaaagcagcggcagaaaaagccgccgcagacaaaaaagcggcagcggcaaaagctgcagctgaaaaagccgctgcagcaaaagcggccgcagaggcagatgatattttcggtgagctaagctctggtaagaatgcaccgaaaacggggggaggggcgaaagggaacaatgctagccctgccgggagtggtaatactaaaaacaatggcgcaagtggggccgatatcaataactatgccgggcagattaaatctgctatcgaaagtaagttctatgacgcaagctcctatgcaggcaaaacctgtacgctgcgcataaaactggcacccgatggtatgttactggatatcaaacctgaaggtggcgatcccgcactttgtcaggctgcgttggcagcagctaaacttgcgaagatcccgaaaccaccaagccaggcagtatatgaagtgttcaaaaacgcgccattggacttcaaaccgtaatcgcgatgttgactgttcggacggtcaacatcaggcaccggttgccacggggttctggtagttttgtgtattttagtttgttaacattctgctaaattatcgtgggccatcggtccagataagggagatatgatgaagcaggcattacgagtagcatttggttttctcatactgtgggcaagtgttctgcatgctgaagtccgcattgtgatcgacagcggtgtagattccggtcgtcctattggtgttgttcctttccagtgggcggggcctggtgcggcacctgaagatattggcggcatcgttgctgctgacttgcgtaacagcggtaaatttaatccgttagatcgcgctcgtctgccacagcagccgggtagtgcgcaggaagtacaaccagctgcatggtccgcactgggcattgacgctgtagttgtcggtcaggtcactccgaatccggatggttcttacaatgttgcttatcaacttgttgacactggcggcgcaccgggtactgtacttgctcagaacagctacaaagtgaacaagcagtggctgcgttatgctggtcataccgccagtgatgaagtgtttgaaaaactgaccggcattaaaggtgcgttccgtactcgtattgcctacgttgttcagaccaacggcggtcagttcccgtatgaactgcgcgtatctgactatgacggttacaaccagtttgtcgttcaccgtagtccgcagccgctgatgtctccggcgtggagtccagacggttctaaactggcttatgtgaccttcgaaagcggtcgttccgcgctggttattcagacgctggcaaatggcgctgtacgtcaggtggctagtttcccgcgtcacaacggtgcacctgcattcagcccagacggcagcaaactggcattcgccttgagcaaaaccggtagtctgaacctgtacgtaatggatttggcttctggtcagatccgccaggtgactgatggtcgcagtaacaataccgaaccgacctggttcccggatagccagaacctggcatttacttctgaccaggccggtcgtccgcaggtttataaagtgaatatcaacggcggtgcgccacaacgtattacctgggaaggtagccagaaccaggatgcggatgtcagcagcgacggtaaatttatggtaatggtcagctccaatggtgggcagcagcacattgccaaacaagatctggcaacgggaggcgtacaagttctgagctccacgttcctggatgaaacgccaagtctggcacctaacggcactatggtaatctacagctcttctcaggggatgggatccgtgctgaatttggtttctacagatgggcgtttcaaagcgcgtcttccggcaactgatggacaggtcaaattccctgcctggagcccgtatctgtgataataattaattgaatagtaaaggaatcattgaaatgcaactgaacaaagtgctgaaagggctgatgattgctctgcctgttatggcaattgcggcatgttcttccaacaagaacgccagcaatgacggcagcgaaggcatgctgggtgccggcactggtatggatgcgaacggcggcaacggcaacatgtcttccgaagagcaggctcgtctgcaaatgcaacagctgcagcagaacaacatcgtttacttcgatctggacaagtacgatatccgttctgacttcgctcaaatgctggatgcacatgcaaacttcctgcgtagcaacccgtcttacaaagtcaccgtagaaggtcacgcggacgaacgtggtactccggaatacaacatctccctgggtgaacgtcgtgcgaacgccgttaagatgtacctgcagggtaaaggcgtttctgcagaccagatctccatcgtttcttacggtaaagaaaaacctgcagtactgggtcatgacgaagcggcatactccaaaaaccgtcgtgcggtactggtttactaagagaattgcatgagcagtaacttcagacatcaactattgagtctgagcttactggttggtatagcggccccctgggccgcttttgctcaggcaccaatcagtagtgtcggcagtggcagcgtcgaagaccgcgtcactcaacttgagcgtatttctaatgctcacagccagcttttaacccaactccagcaacaactttctgataatcaatccgatattgattccctgcgtggtcagattcaggaaaatcagtatcaactgaatcaggtcgtggagcggcaaaagcagatcctgttgcagatcgacagcctcagcagcggtggtgcagcggcgcaaagtaccagcggcgatcaaagcggtgcggcggcaagtacgacgccgacagctgatgctggtactgcgaatgctggcgcgccggtgaaaagcggtaatgcaaacacggattacaatgcagctattgcgctggtgcaggataaatcccgccaggatgacgcaatggtggcatttcagaatttcatcaaaaattaccctgatagtacttacctgccaaacgccaattattggctgggtcagttaaactacaacaagggtaaaaaagatgatgcggcgtactattttgctagcgtagtgaaaaactatccgaagagtccaaaggctgcagatgcgatgtttaaagtcggcgtcatcatgcaggacaaaggtgacaccgcaaaagcgaaagccgtataccagcaggttatcagtaaataccctggtactgatggcgctaaacaggcacaaaaacgtctgaacgcgatgtaatgcataacacacgaccagaagtcgcattatttctggtcgtgtcgtgcgaatcataagcagttgagtgatctacatcgaaatttttgttgcgctcaagtctgaaatcagtaatatatgccgccgttgccacgggatatcaaacaaaccgaaagcaacgaaaaagtgggtcgttagctcagttggtagagcagttgacttttaatcaattggtcgcaggttcgaatcctgcacgacccaccaatcgctaaggtggaagcggtagtaaaacgtgaaggataacgttgcatgagcaacggcccgaagggcgagacgaagtcgagtcatcctgcacgacccaccactaacatagttagttgtagtatccagcgtagtatcgggtgattagctcagctgggagagcacctcccttacaaggagggggtcggcggttcgatcccgtcatcacccaccaccgggtcgttagctcagttggtagagcagttgacttttaatcaattggtcgcaggttcgaatcctgcacgacccaccagttttaacatcgaagacagatgttaagcgtgtaggataacgttgcgtcagcaacggcccgtagggcgagcgaagcgagtcatcctgcacgacccaccactaatgacggtgggttcggtggaagtagtttgtagtatccagcgcagtatcgggtgattagctcagctgggagagcacctcccttacaaggagggggtcggcggttcgatcccgtcatcacccaccactcgggtcgttagctcagttggtagagcagttgacttttaatcaattggtcgcaggttcgaatcctgcacgacccaccagttttaacatcaaactcagatgttaagcgtgaaggataacgttgcgccagcaacggcccgtagggcgagcgaagcgagtcatcctgcacgacccaccaatcttaaagattggccccgagtaaaaatctttcaggtaacacccgtatgggtcgttagctcagttggtagagcagttgacttttaatcaattggtcgcaggttcgaatcctgcacgacccaccaatttaaaggtggttactggtagagaacgtgaaggataacgttgcgttagcaacggcccgaagggcgagacgaagtcgagtcatcctgcacgacccaccatcctgaatgattaaggcagcataatcccgcaaggggtcgttagctcagttggtagagcagttgacttttaatcaattggtcgcaggttcgaatcctgcacgacccaccaatgtaaaaaagcgccctaaaggcgcttttttgctatctgcgatactcaaagattcgaacctgcagcaggtttgagttgagcgcagcgaaacaacggagccgctcgcggcgacggcccgaagggcgagcgaagcgagtcatcctgcacgacccaccaatgtaaaaaagcgccctaaaggcgcttttttgctattcaggcatcctcaatttcactttgtaaacctgatgacatcgtcagagcttactgtgcaagcaactctatgtcggtggaattaggcgtaaaatgacgcatcctgcacattaggcgtaattcgagtgacttttccccaccattcgactatcttgtttagcatataaaacaaattacaccgataacagcgaatattacgctaatgtcggttttaacgttaagcctgtaaaacgagatggtaagatgagcgtaatgtttgatccagacacggcgatttatcctttccccccgaagccgacgccgttaagcattgatgaaaaagcgtattaccgcgagaagataaaacgtctgctaaaagaacgtaatgcggtgatggttgcccactactataccgatcccgaaattcaacaactggcagaagaaaccggtggctgtatttctgattctctggaaatggcgcgcttcggtgcaaagcatcccgcttctactttgttagtcgctggggtgagatttatgggagaaaccgccaaaattctcagtccggaaaaaacaattctgatgccgacacttcaggctgaatgtagtctggatctcggctgccctgttgaagaatttaacgcattttgcgatgcccatcccgatcgtactgtcgtcgtctacgccaacacttctgctgcggtaaaagcgcgcgcagattgggtggtaactagtagcattgccgtcgaacttattgatcatcttgatagtttgggtgaaaaaatcatctgggcacccgacaaacatctggggcgttacgtgcaaaaacagacgggtggagacattctatgctggcagggtgcctgtattgtgcatgatgaatttaagactcaggcgttaacccgcttgcaagaagaatacccggatgctgccatactggtgcatccagaaagtccacaagctattgtcgatatggcggatgcggtcggttccaccagtcaactgatcgctgctgcgaaaacattgccacatcagaggcttattgtggcaaccgatcggggtattttctacaaaatgcagcaggcggtgccagataaagagttactggaagcaccaaccgcaggtgagggtgcaacctgccgcagctgcgcgcattgtccgtggatggccatgaatggccttcaggccatcgcagaggcattagaacaggaaggaagcaatcacgaggttcatgttgatgaaaggctgcgagagagggcgctggtgccgctcaatcgtatgctggattttgcggctacactacgtggataacgaataataaggcgtaacgttacgctttgggggaaagatggatttttttagtgtgcagaatatcctggtacatataccaataggggcaggcggttatgatctcagttggatcgaagcggtaggcacgatcgccgggttgctgtgtattggccttgccagtctggagaagatcagcaactacttctttggcctgatcaacgtcaccttgtttggcattattttctttcagattcagctgtatgccagcctgctattacaggtgtttttctttgccgcgaatatttacggttggtatgcgtggagccgacaaaccagtcagaacgaggcggagttgaaaattcgctggttgccattgccgaaggcactcagctggttggcggtttgcgttgttagcattggtctgatgacggtatttatcaatccggtgtttgcatttttgacccgcgtggcagtcatgatcatgcaagcattaggattacaggttgtgatgcctgaactgcaaccggacgctttcccgttctgggatagttgcatgatggtgttatctatcgtggcaatgattctgatgacgcgtaagtatgtggaaaactggctgttgtgggtgattattaacgtgattagcgtcgttatttttgcacttcagggcgtttacgccatgtctctggagtacatcatcctgacctttattgcgctcaacggcagccggatgtggatcaacagcgcacgtgaaagaggcagtcgcgcgctgtcccattaatggtgatgatgactatggccagacaccccttcattcaggtggcagtctggcccatgacaaggttgatattccatctgaatggtggcgtgctcaatctgatagtgatccatcaggtagtgttggatctgatccaacaaggcatcgtgatcgtgtggcgggatcacctgcacatgcaacgtcatcaccggcttctcgcctaccatccatacatgtacatggtgcacattgcggacttccgggatttcccggcacatacgacgcttcagttcagcgatatccaggcttaccggtgcaccttcaagtaattcattcacgctatctttcaacagtcgccacgcgctacgcagaaccagaaggctcaccagtatgctgagaatggggtcagcaggtgtccagccagtccagataataatcaacgcggcaataatagccccaacgctacccagcaggtccccgagcacatgcagtgccgctgctcgtacgttgaggtttttctcttcgctgccgtgatgaagtaaccagaaagaaagtatatttgccagcaacccagccacggcaattgccatcatcatgccgccctcgaccggacgcggcgtgcggaagcgttctatcgcctcccagacaatcaaaatggtaattaccacgagggctatggcattcacaaacgccgcgagcgtggtcagtcttagccaaccgaaagtgtggcgaatggtgggaggacgacgactaaattgcacggcgagtagggcgaaaagcagggcggcagtatcggtcaacatatgacccgcatcggccagcaatgccagagaaccagaaagaaaaccaccaacgacttctaccagcataaacccggcagtcacgccgaaagcatacaacaagcgacgagcattattatcttctggcaggtgactggacgtgtgactgtgactgtgcgccatgacgagtcatcccttaattattctcacttaactttatgacatcatactgcttttagaagtgaaaaattaaaagggagagactccgctctcccattattggctattttgcagggttactgcgtggtaccgtcggttttggtatcgacatcattattgatgccatcaccggtttgtacctttttattgatatccggacagcgaccatctttgcacatggtgttcttgtgctcttcatctttggtcattccgtcattgttcatactagaaccatcgctatgcagcattgtgccgccagaaccggtatttaccccgttattgtcgacgttatttggcgcgacattttcacgggcgtcaggggctacctggcccgcatcagctgcggcgtttgcctggccgttattagtttgcgctccgctatcggcagccagtgcggcaccgctggcaaggcttagagtggcagtcagaaataatgtggccagttttgtcattttcataggatgctcctgttatggtcgttatgtcggataacctcttccaacagtgcatttgcaggtgaatataaggcattggtttaagatttcagccaggttatgaaacgcagcagagaatcttgaaataattaacaaacaaaggagttacagttagaaattgtaggagagatctcgtttttcgcgacaatctggcgtttttcttgctaattccaggattaatccgttcatagtgtaaaaccccgtttacacattctgacggaagatatagattggaagtattgcattcactaagataagtatggcaacactggaacagacatgaattatcagaacgacgatttacgcatcaaagaaatcaaagagttacttcctcctgtcgcattgctggaaaaattccccgctactgaaaatgccgcgaatacggttgcccatgcccgaaaagcgatccataagatcctgaaaggtaatgatgatcgcctgttggttgtgattggcccatgcagtattcatgatcctgtcgcggcaaaagagtatgccactcgcttgctggcgctgcgtgaagagctgaaagatgagctggaaatcgtaatgcgcgtctattttgaaaagccgcgtaccacggtgggctggaaagggctgattaacgatccgcatatggataatagcttccagatcaacgacggtctgcgtatagcccgtaaattgctgcttgatattaacgacagcggtctgccagcggcaggtgagtttctcgatatgatcaccccacaatatctcgctgacctgatgagctggggcgcaattggcgcacgtaccaccgaaagccaggtgcaccgcgaactggcaagtgggctttcttgtccggtcggcttcaaaaatggcaccgacggtacgattaaagtggctatcgatgccattaatgccgccggtgcgccgcactgcttcctgtccgtaacgaaatgggggcatagcgcgattgtgaataccagcggtaacggcgattgccatatcattctgcgcggcggtaaagagcctaactacagcgcgaagcacgttgctgaagtgaaagaagggctgaacaaagcaggcctgccagcacaggtgatgatcgatttcagccatgctaacagctccaaacaattcaaaaagcagatggatgtttgtgctgacgtttgccagcagattgccggtggcgaaaaggccattattggcgtgatggtggaaagccatctggtggaaggcaatcagagcctcgagagcggggagccgctggcctacggtaagagcatcaccgatgcctgcatcggctgggaagataccgatgctctgttacgtcaactggcgaatgcagtaaaagcgcgtcgcgggtaaggtttaattgtcggatgcgccgtcagagtggcgtatccgatgaatcaccacaggcctgataagtcgcgcagcgtcgcatcaggcaatgtgctccattgttagcaacaaaaaagccgactcacttgcagtcggctttctcattttaaacgaatgacgtttacttcgctttaccctggtttgcaaccgccgctgctttcgctgcgatctcgtcagcattacccagataatagcgtttcagcggtttgaaattctcgtcgaactcatacaccagcggcacgccagtcgggatattaagctcaagaatctcttcttcgctcatgttatcaagatatttcaccagcgcacgtaaagagttaccgtgtgcagcgatgatcacgcgctcaccgctcttcatacgcggcagaatagtttcattccagtaagggatcacgcggtcaatggtcagcgccaggctttccgtcagcggcagttctttctcgctcagtttcgcgtaacgcggatcgtgacccggataacgctcatcatctttagtcagttccggcggagtcactgcaaaaccacgacgccactgtttcacctgctcgtcgccatacttttcagcagtttccgctttgttcagaccctgcaacgcaccgtagtgacgttcgttcagtttccaggatttctcaacgggcagccatgcctgatccagttcgtccagcacattccacagggtatggatagcgcgtttcagcacagaagtgtaagcaaagtcaaagctgtaaccttcctctttcagcagcttacctgctgcttttgcttcgcttacgcctttctcagacagatccacgtcgtaccaaccggtgaaacggttttctttgttccactgactttcgccatgacgaaccagaaccagcttagttacagccatatacttactcctcaaatcatcttttaatgataataattctcattatattgccgcgacgaagcaacagcaatgcttacgcataaccatagcgaaaatagtggcgcagtgtaaggttgttgtgaatattgagttgcaaatatgtcggtgtttgctggtgatttgaacaatatgagataaagccctcatgacgagggcgtaacattactcagcaataaactgatattccgtcaggctggaatactcttcgccaggacgcaggaagcagtccggttgcggccattcagggtggttcgggctgtccggtagaaactcgctttccagagccagcccttgccagtcggcgtaaggttcggttccccggctcggtgtgccgccgaggaagttgccggagtagaattgcagagccggagcggtggtgtagaccttcagctgcaatttttcatctgcactccagacatgcgccgccactttcttgccatcgcctttggcctgtaacaagaatgcgtgatcgtaacctttcactttgcgctgatcgtcgtcggcaagaaactcactggcgatgattttggcgctgcggaaatcaaaagacgttccggcgacagatttcaggccgtcgtgcggaatgccgccttcatcaaccggcagatattcgtccgccagaatctgcaacttgtgattgcgcacgtcagactgctcgccgtcaagattgaaatagacgtgattagtcatattcaccgggcaaggtttatcaactgtggcgcgataagtaatggagatacggttatcgtcggtcagacgatattgcaccgtcgcgccgagattacccgggaagccctgatcaccatcatcactactcagggcaaacagcacctgacgatcgttctggttcacaatctgccagcgacgtttgtcgaacccttccggcccgccgtgcagctggttaacgccctgacttgggctaagcgtcacggtttcaccgtcaaaggtataacggctattggcgatacggttggcataacgaccaatagaggcccccagaaacgcggcctgatcctgatagcattccgggctggcacagccgagcagcgcctcgcggacgctgccatcggaaagcggaatacgggcggaaagtaaagtcgcaccccagtccatcagcgtgactaccatccctgcgttgttacgcaaagttaacagtcggtacggctgaccatcgggtgccagtgcgggagtttcgttcagcactgtcctgctccttgacttggtttacaaacgtaaaaagtctctttaatacctgtttttgcttcatattgttcagcgacagcttgctgtacggcaggcaccagctcttccgggatcagcgcgacgatacagccgccaaatccgccgccggtcatgcgtacgccacctttgtcgccaatcacagctttgacgatttctaccagagtgtcaatttgcggcacggtgatttcgaaatcatcgcgcatagaggcatgagactccgccatcaactcgcccatacgtttcaggtcgccttgctccagcgcgctggcagcttcaacggtgcgggcgttttcagtcagtatatgacgcacgcgttttgccacgatcgggtccagttcatgcgcaacagcgttgaactcttcaatggtgacatcacgcagggctggctgctggaagaaacgcgcaccggtttcgcactgttcacgacgggtgttgtattcgctgccaaccagggtacgtttgaagttactgttgatgatgacgacagccacacctttgggcatggaaactgctttggtccccagactgcggcaatcgatcagcaaggcatgatctttcttgccgagcgcggaaattagctgatccatgatcccgcagttacagcctacaaactggttttctgcttcctgaccgttaagcgcgatttgtgcgccgtccagcggcagatgataaagctgctgcaatacggttccgaccgcgacttccagactagcggaagaacttaacccggcaccctgcggcacattgccgctgatcaccatgtccacgccgccgaagctgttgttacgcagttgcagatgtttcaccacgccacgaacgtagttagcccattgatagttttcatgtgcgacaatgggcgcatcgagggaaaactcgtcgagctgattttcataatcggctgccatcacgcgaactttacggtcatcgcgtggtgcacaactgatcacggtttgataatcaatcgcgcagggcagaacgaaaccgtcgttgtagtcggtgtgttcaccaatcaaattcacgcggccaggcgcctgaatggtgtgagtggcagggtagccaaatgcgttggcaaacagagattgtgttttttctttcagactcatttcttacactccggattcgcgaaaatggatatcgctgactgcgcgcaaacgctctgctgcctgttctgcggtcaggtctcgctgggtctctgccagcatttcataaccaaccataaatttacgtacggtggcggagcgcagcagaggcggataaaagtgcgcgtgcagctgccagtgttgattctcttcgccattaaatggcgcgccgtgccagcccatagagtaggggaaggagcactggaagaggttgtcataacgactggtcagctttttcaacgccagcgccagatcgctgcgctgggcgtcggtcaaatcggtgatccgtaaaacgtgggctttgggcagcagtagcgtttcgaacggccaggcagcccagtaaggcacgacggctaaccagtgttcggtttcgacaacggtacggctaccgtctgccagctcgcgctgaacataatccaccagcattggacttttctgttcggcaaaatattctttttgcaggcggtcttcgcgctcagcttcgttaggcaggaagctatttgcccaaatctgaccgtgcggatgcgggttagagcagcccatcgccgcgcctttgttttcaaaaacctgcacccatgggtacgttttccccagttctgcggtttgctcctgccaggttttgacgatttccgtcaatgctgcaacgctgagctctggcagcgttttactgtgatccggactaaagcagatcacccggctggtgccgcgcgcgctctggcaacgcatcagcggatcgtgactttctggcgcatctggcgtgtcagacatcaaagccgcaaagtcattagtgaaaacgtaagtcccggtgtaatcggggtttttatcgcctgtcacccgcacattacctgcgcagaggaagcaatctggatcgtgcgcaggtaacacctgtttggctggcgtttcctgcgccccctgccaggggcgcttagcgcggtgcggactaaccagaatccattgcccggtgagcgggttgtagcggcgatgtggatgatcaacgggattaaattgcgtcatggtcgttccttaatcgggatatccctgtggatggcgactctgccagtgccaggtgtcctgcgccatttcatcgagtgtgcgcgttacgcgccagttcagttcacggtcggctttgctggcgtccgcccagtaggccggaaggtcgccctcgcgacgcggtgcaaaatgataattaaccggtttgccgcaggctttgctgaaggcattaaccacgtccagcacgctgttgcctacgccagcgccgaggttgtagatgtgtacgcctggcttgttcgccagtttttccatcgccacgacgtgaccgtccgccagatccattacgtggatgtaatcgcgtacgccagtaccatcttcggtcggataatcgttaccaaaaatcgccaggctgtcgcgacggcctacagcaacctgggcgatgtatggcatcaggttattcggaatgccttgcggatcttcgcccatatcgccgctcggatgcgcgccaaccgggttgaagtagcgcagcagggcaatgctccagtccggctgggctttttgcagatcggtgaggatctgttccaccatcagcttgcttttgccgtaagggctttgcggtgtgccggtcgggaagctttcaacgtatggaattttgggctgatcgccataaacggtggcggaggagctaaaaataaagtttttgacgttagcggcgcgcatggcgctaatcaggcgcagagtgccgttgacattgttgtcgtaatattccagcggtttttgtacgctttcgcccacggctttcagcccggcgaagtggatcacggtgtcgatagcgtgatcgtgcaggatctcggtcatcaacgcttcgttacgaatatcgccttcaacaaacgttggatgtttgccgcctaaacgctcgataacaggcagtacgatgcgcttactgttacagaggttatcaagaatgatgacatcatgaccgttttgcagtaattgcacacaggtatgacttccaatgtaaccgctaccaccggtaaccagaactctcataattcgctccattaggcttatggtatgaaataaccatagcataacaaagatgcgaaaagtgtgacatggaataaattagtggaatcgtttacacaagaatttagccgttttttatgcgcgattaagtgattataaaacagagggtttatgaatgattgcgctttttatctgaaaaaagacgcggtttcatgcctgcatgcgtcgaaccgttggccggagagggtgctaaggccgcctccggcaaggtcagcactaccgactcaatatatttttgtcagcacatagcgatagagtccaccgtccggcacgaactcaagacgatgggtaatacaggcaggcgcatcttcagcgtggtggctaacaaacaacaattgcgtttcaccttcgctaatcagcacatcaacaaaacggcggataagctggcgattcagcggatcaagcccctgtagtggttcatcgagaataagcaacgtcggatgtttcaccagtgcgcggacaatcagcgccagacgctgctgtccccaggaaagactatggaacggagcgtcagccgtgcgtttatcaatgccgagaatatccagccactgctgcaccagtttttgctggcgatcgctaacggcctgataaatgccaatgctatcaaaatagccagaaagaatcacattacgcacggtagtgctgacccggtaatccagatgcaaactactgctgacgtaaccgatatgctttttgatatcccagatggtttcgccgctgccgcgacgtcgtccgaaaagcgtcaaatcgttgctgtaaccttgcggatgatcgccagtaaccaggcttaataacgtgctttttcctgcaccatttggcccgacaatttgccagtgttcgcctggattcacctgccagctaaggttattaagaatggggcgatcgttataagaaaccacgccattgttcagcacaatgcgcggttcgttggcgggtaaggcgtgacgtgcactaggttcatccggctccggcagttgcacaccttcaagctgttcactatgcgccagttgcgcgacgagtgcttgttggagcagttcctctttagcgccagtttccgctaacgtgcaatccgccagcacgccagcaaactggacaaactccgggatctcatcgaagcgattgagcaccagtaccagagtaataccggactgatgtaagctggcgagtcgctcagccagctgctgacgactggcaacatccaggccatcgaacggctcatcaagaatcaacaagtcaggctcgctcatcagcgcctgacacagcagggtttttcgcgtctcgccagtggaaaggtatttaaagcgtcggtcgaggagggcggtaataccgaactgctgcgccagttgcatgcaacgcggtgcatcctttacttcatcctgaatgatctcagccgtagtgcgtccggtgtcatcttcgccagggccgagcatatcggtgttattccgctgccattcgtcgctgacgagtttttgcaattgctcgaaggagagacgagtgatgtgggaaaactggctttgccgttcacctttcaaaagcggaagttcccccgccagcgcgcgggccagggcgcttttcccgcttccattgctaccgacaaacgcccaactatcacccgcgtttaacgttagctgaggcaattgcagcgtttttgtgtcgctaagacgaaacgtgccttgcaaaatttgcaagctactcattttatatcccactttgtgcagcgattactgacagggatacgtgtttcataacaaattgtcaacacgcttagcacagcgtggcgataatcacgctgtcggcattaaagtaggccgtgacattctgtccttgctgaagagaagtcgcttcatttaccggcactgtggcgcacagtgtttgcccgtcgggtagcgccattaatacttcgcactgctctgcgccgcgctcaatatgactaataatacccggtaattggttgtcagcgttttgcgcgaccgcctcgtcctgagtaatacctacccacggcgcttttagcaatatcaacacttctttgccttcatccagccccagacgcgcgccgctttgtgcggtaattgcgactttcaggcgtgtttttccgtcagccagtaagacatcaacatgctgttgaacgtcatcatgatcgcgggcggtgatggtaccgaaccactggttacgggcgctggtttgcagactaaaacgactgatcgcggccagcaggctgttcagcggcagggcgtcatcgtcacttaacacatcaaaggctttttgctggatttgcgccagtaagtcatagagctgaatcagtcgctgaccatagcgggtcagtactgcgccgccgccacctttaccgcctgttgcgcgctcgaccagaatatgctcacttaactgattcatctcgttaatggcatcccaggcgcttttatagctaataccggcatctttcgctccctggctaatggaaccggaaagcgcaatgtgttttagtaggctaatgcggcgcgggtcggcgaataatttttgttggagcttaagggtgagaaggatttcggcctgcataacaatgtcctggcaaaagtcttattgtgacggaaaacgaacgccacgcaaagctgaccgcacaaaaggggagtgcttttctgtgcttagcggttagaatagtctcatgactatatctggagttgaccatgttagagttattaaaaagtctggtattcgccgtaatcatggtacctgtcgtgatggccatcatcctgggtctgatttacggtcttggtgaagtattcaacatcttttctggtgttggtaaaaaagaccagcccggacaaaatcattgattccctgaatgcccgcttagtcgggcattttctttttctcaacttcctgcttttcctgccgatattttttcttatctacctcacaaaggttagcaataactgctgggaaaattccgagttagtcgttatattgtcgcctacataacgttacattaaggggttaccaatggctcgtaaatggttgaacttgtttgccggggcggcactctctttcgctgttgctggcaatgcactggcagatgaagggaaaatcacggtgttcgccgccgcaagtctgactaacgcaatgcaggacattgctacgcagtttaaaaaagagaaaggcgtggatgtggtttcttctttcgctagcagttctactctcgcccgtcagattgaagcgggtgcgcctgcggatctgtttatttctgccgatcagaaatggatggattatgcggttgataaaaaagcgatcgatacagctacgcgtcagacactgctcggcaatagcctggtcgttgtagcaccgaaagccagcgtgcagaaagatttcaccatcgacagcaaaaccaactggactagtctgctgaatggcggtcgcctggcggttggcgatccggaacatgttcccgctggcatttatgcaaaagaagcactgcaaaaactgggcgcatgggatacgctctctccgaaactggccccagcggaagatgttcgtggggcgctggcgctggtcgaacgtaacgaagcgcctctgggcattgtctacggttctgacgcagttgccagcaaaggggtaaaagtggttgccaccttcccggaagatagtcataaaaaagtggaatatccggttgctgttgtggaagggcataacaatgcgacagtgaaagcattttatgattatctgaagggaccgcaggcagcggaaatctttaaacgttacggatttacaatcaagtaatgatactgaccgatccagaatggcaggcagttttattaagcctgaaagtttcttccctggctgtgctgtttagcctgccgtttgggatcttttttgcctggttactggtgcgttgcacgtttccgggcaaagctctgctcgacagcgtactgcatctaccgctggtgttaccgcccgtggtcgtcggttacttattattagttagcatgggacggcgcggatttatcggtgaacgtctgtatgactggtttggtattaccttcgcctttagctggcgcggcgcggttctcgctgccgccgtcatgagctttccgctgatggtgcgggcaattcgtctggcgctggaaggggttgatgtcaaactggaacaggccgcaagaacactgggggccgggcgctggcgcgttttctttactatcacgttaccgctgaccttaccgggaattattgttggtacggtactggcttttgctcgttctctcggtgagtttggtgcaaccatcacctttgtgagcaacattcctggtgaaacgcgaaccattccttctgccatgtataccctgatccagacccccggcggggaaagtggagcggcgagactgtgcattatttctattgcgctggcgatgatctccctgttgattagtgaatggctggccagaatcagccgtgaacgggcggggcgctaatcatgctggaactgaatttttcccagacgttgggcaaccattgcctgactattaatgaaacgctgcccgccaatggcatcactgctatctttggcgtctccggtgccggaaaaactagcctgattaacgccatcagtggactgacgcgcccgcaaaaagggcggattgtcctcaatgggcgggtactaaatgatgccgaaaaaggtatctgcctgacgccggaaaagcgtcgcgttggctatgtttttcaggatgcgcggctgttcccgcattacaaagtgcgtggcaatctgcgctacggcatgagcaaaagtatggtcgatcagttcgataagctggtggcgcttttaggcattgaaccgttgcttgaccgtttaccaggcagcctgtccggaggcgaaaaacagcgcgtggcgattggtcgggctttgctgacagcaccggaattgctgttgctggatgaaccgctggcgagtctggatattccgcgtaaacgcgaactgttgccttatctgcaacggctgacacgggaaatcaacattccgatgttgtatgtcagccatagcctggatgagatcctccatctggcagacagagtgatggtactggaaaacggtcaggtgaaagcctttggcgcgctggaggaagtgtggggcagtagcgtgatgaatccgtggctgccgaaagagcaacaaagtagcattctgaaagtgacggtgcttgagcatcatccgcattacgcgatgaccgcgctggcgctgggcgatcagcatttgtgggtcaataagctggacgaaccgctgcaagctgcgctacgtatccgcattcaggcttccgatgtttctctggttttacaaccgccgcagcaaaccagcattcgtaacgtattgcgggcaaaagttgttaatagttatgacgacaacggccaggtggaagtggaactggaagtcggcggtaaaacgctgtgggcgcgtatcagcccgtgggccagggatgaactggcgatcaaacctggcctgtggctgtacgcgcaaattaaaagtgtgagcataaccgcctgattaaatcaggtggctataaatgaactgggcaatgctgtcggtggtgttatcaccaatcacaatgttggcgcgcgcttttaccgcgtcatcggcgttgcccatcgccacgcctgtaccagcggcttccagcatactgatatcattaaagttatcgccgaatgccacgacgttttccatgctccaaccttgcgcctcaacccatttcgtcaaacgtttacctttgctgttgccgccgcgtgcaatatcaacctgatcgtgccaggaccattcacactccagtcccagttcatgttcgacatgcttaccaaaatgctgcaattgcggcaggtcatcgtgcgtcagggcgaacttccatacggcgttaacttgttgcgccgtttcagccagagaagcgacttgtgtgaaagtcggacgctgttccggcggcagggtttgcgcccagttagatgtgcgaatgacatgcccggtcgggtgctcatagaccattgcatcatcgacatacatcagaccgtgaatgtggtgttcattcagcatctcaatgagttgcagggctttaataacgggcattgggtccgcttccagcacggtttttgcatgataatcatacaaataggtgccattacagcaaatagcaggtgtatccagcgccagcgcctgataaaaaggatgaatagcgacgtgatggcgacctgtgacgatgattaattgatagcctgcttcgcgagcgcgggccagggcttctatgctactaggaagcagggtctttttcggggtcaataaggtgccgtctaagtcgagagcaatcacgcgtgtggtcatggcgtattccagattaaggttaagaattttcgtctgcgcgaatggtacaccgataccactatcggacaaaattctgcgttttaattcagcattcaccgccaaaagcgactaattttagctgttacagtcagttgctaaatgcaaaggagcattcatgaagcaaacagtttatatcgccagccctgagagccagcaaattcacgtctggaatctgaatcatgaaggcgcactgacgctgacacaggttgtcgatgtgccggggcaggtgcagccgatggtggtcagcccggacaaacgttatctctatgttggtgttcgccctgagtttcgcgtcctggcgtatcgtatcgccccggacgatggcgcactgacctttgccgcagagtctgcgctgccgggtagtccgacgcatatttccaccgatcaccaggggcagtttgtctttgtaggttcttacaatgcgggtaacgtgagcgtaacgcgtctggaagatggcctgccagtgggcgtcgtcgatgtggtcgaggggctggacggttgccattccgccaatatcagtccggacaaccgtacgctgtgggttccggcattaaagcaggatcgcatttgcctgtttacggtcagcgatgatggtcatctcgtggcgcaggaccctgcggaagtgaccaccgttgaaggggccggcccgcgtcatatggtattccatccaaacgaacaatatgcgtattgcgtcaatgagttaaacagcagtgtggatgtctgggaactgaaagatccgcacggtaatatcgaatgtgtccagacgctggatatgatgccggaaaacttctccgacacccgttgggcggctgatattcatatcaccccggatggtcgccatttatacgcctgcgaccgtaccgccagcctgattaccgttttcagcgttagcgaagatggcagcgtgttgagtaaagaaggcttccagccaacggaaacccagccgcgcggcttcaatgttgatcacagcggcaagtatctgattgccgccgggcaaaaatctcaccacatcagcgtatacgaaattgttggcgagcaggggctactgcatgaaaaaggccgctatgcggtcgggcagggaccaatgtgggtggtggttaacgcacactaaccgctgatttacccggcgcagtctctcctgcgccggtgtattaacctatctcctgtaacgcgtgtctctggcgttcgacgatattggtccacaaattgtctttatcgtcagtccataaattaatcagcaaggcaaaaaagcgttctgctgctggagaaagtacggcatctttacggcgaattattcccaatgttcgacgtataacgggttccaccaatgggataccaataatgctagaatagggcgcatgaggcattgccaggccaggaagcgcgctaatccccagtcccgcctccaccagtcctaaactcgtgctaagatgacgcacttcgtaaaaccagtccagcttccagggcttgtcggccagctgttgttctatcaacagtcggttgccgctggaggagcgtacgccaatcattttgtaacccactaactcctgccattctacaagctgctttttggccaatggatggtcacgccgacaggccagcacgaacggctcgttgaccagtggggtaaaatcaatggaactatttgtgacgttgttcatgtttatgccaaagtcactttcgttacacagcacgctttccatgcaattattcgtgccttgttccagaatccgcactttaatattgggatacagctcattaaatttaccgattgccagcggtaaaaaataaaatactgcggtcggaatacacgctaacgtcaccataccacgatgataagcattcatatcacgaatattaaaaagcgtttcatcgaatttctttattaattcccgcgcctccgggagcaacctttttcctgcttttgttaacgtaaccttgcgagttgtacgctcaaatagttgaacatgtaaatcttcctccatcttttttattcttcgcgttaatgcaggttgcgtaatattgagtaatttagcggcattgttaaagctactggactctgccagtatgacaaatgccttcatactacttaattcatgcttcattattactccggaaaatggaaggctgctttttgggtggctggccgttaaaaattttaactgcatttagccaacttaaattaatgaaaaaatgttattaatcgttgagctaaagtcattagagatgctttgcccttaatgtaaccatatcgcaataagttatgtttttaaattgagggcattattatgaaaaaaataccctgcgtgatgatgcgaggtggaaccagcaggggcgcgttcctgttagcggaacatttacccgaagatcaaacgcagcgcgataaaatattgatggcaattatgggttccggtaacgatctggaaattgacggtattggcggcggtaatccactgaccagtaaagtcgccattattagccgttccagcgatccgcgtgctgatgtcgattatctgtttgcgcaggtaatcgttcatgagcaacgtgtcgataccacgcctaactgcggcaatatgctgtctggtgttggggcattcgccattgaaaatggtttgattgcagcgactagcccagttactcgcgtacgtatccgcaacgtcaatacgggtacgttcatcgaagctgatgtgcaaacgccaaatggtgttgtcgagtacgagggtagcgccagaattgacggcgtaccgggtactgccgcaccggttgcgctcactttcctgaatgccgctggaaccaaaaccggaaaagttttcccgactgataatcagattgattattttgacgatgtcccggtgacctgtatcgatatggcgatgccagtcgtcattattccggctgaatatctgggaaaaacaggttatgaattaccggcggaactggatgccgacaaagcattattagcccgcattgaatctatccgtctacaagcgggtaaagcaatgggcttaggtgatgtcagtaatatggttatccctaaacctgtgcttatttctccagcgcagaaaggcggggcaattaatgtgcgttattttatgccgcattcttgccatcgcgcgctggcgataaccggtgctattgctatttccagtagttgtgcattggaaggcaccgtcacccgacaaatcgtcccttctgtaggatacggcaatatcaatattgaacaccccagtggtgcgctcgacgttcatttaagtaatgaaggtcaggatgccacgacgttacgcgcatctgttattcggacgaccagaaaaatattttccggtgaagtttatcttccctgaaaaaattcgttgtcaggataaggacaatcaataaaggacttctgtatgagtcatacagaaagaacaggattttaaatgaataagaaaagcttatggaagctaattctgatattagcgatcccatgtattattggttttatgccagctccggcaggattaagcgaactggcgtgggtgctttttggtatttacctggcggccattgtggggctggttatcaagcctttcccggaacctgtcgtactgttaattgccgttgctgccagtatggtggtggtcggtaacttatccgacggtgcgtttaaaaccaccgccgtattaagcggttactctagtggtaccacctggctggtgttcagcgcgtttaccttaagcgccgcatttgtgaccaccggtttaggtaaacgtattgcctatctgctgattggtaaaatcggtaacaccacgctgggtctgggttacgttacggtattcctcgatctggtactggctccggcaacaccgtctaacaccgcgcgtgcgggcggcattgtgttaccgatcatcaacagcgtggcggtggctttggggtccgaaccggaaaaaagtccgcgtcgtgtcggacattacctgatgatgtccatttacatggtcaccaaaaccaccagctatatgttctttaccgcaatggcggggaacattctggcgctgaaaatgatcaacgacattctgcacctgcaaattagctggggtggatgggcgctggcagccggattgccgggcatcattatgctgctggtcaccccgctggtgatttacaccatgtatccaccagaaattaagaaggtggataacaaaaccatcgctaaagcgggccttgccgaactaggaccgatgaaaatccgcgaaaaaatgctgctcggtgtctttgtgctggcgctgctgggctggattttcagtaagtctctgggggttgatgaatccaccgtggcaatcgttgttatggcaaccatgctgctgctgggtatcgttacctgggaagacgtggttaaaaataaaggcggctggaataccttaatctggtacggcggtattatcggcttaagctccttattaagcaaagttaaattcttcgaatggttagctgaagtctttaaaaataacctggcatttgatggtcacggtaacgttgctttcttcgttattattttcctcagcattatcgtgcgttatttcttcgcttccggtagtgcctatatcgttgctatgttaccggtatttgccatgctggcgaacgtctccggcgcaccgttaatgttaaccgcgctggcactgttgttctccaactcctatggcggcatggttactcactatggcggcgcggcaggtccggtcatctttggcgtgggttataacgatattaaatcctggtggttggtcggtgcggtactgacgatattaaccttcctggtgcatatcaccctcggcgtgtggtggtggaatatgctgatcggctggaacatgctgtaaatattctcgtcatacttcaagttgcatgtgctgcgtctgcgttcgctcaccccagtcacttacttatgtaagctcctggggattcactcgcttgtcgccttcctgcaactcgaattatttagagtatatccatttattatctttctgcgcacttcacggtgcgcagatatctggagcatttgatgatcaagttatctgaaaaaggcgtgtttctcgccagtaataacgaaataattgccgaagaacatttcaccggcgaaattaaaaaagaagaagccaaaaaaggcactattgcctggtctattctctctagccataatacgtccggaaatatggataaacttaaaattaagtttgatagtttagcctctcacgatattacctttgttggtattgtacagaccgctaaagcgtccggtatggaacgtttcccgctgccgtatgtgctgaccaactgccataacagtctctgcgccgtcggcggcactattaacggtgatgaccatgtttttggtttaagcgcggcccagcgttatggcggtatttttgtgcctccgcatattgcggtcatccatcaatatatgcgtgagatgatggcaggcggcggcaaaatgatcctcgggagtgacagccacacccgttacggtgcattagggacaatggcagtcggtgagggcggcggtgagttggtaaaacagctgcttaatgacacctgggatatcgactatccgggcgtggttgcggtgcatctgaccggaaaacctgcgccgtatgtggggccacaggatgtggcgctggctatcattggcgcggtgttcaaaaacggttacgtcaaaaacaaagtcatggagttcgttggaccgggcgttagcgcgctctctaccgatttccgtaacagcgttgacgtgatgaccactgaaacgacctgtttaagttctgtctggcaaaccgatgaagaagtccataactggctggcgctgcacggtcgcggccaggattactgccagcttaaccctcaaccgatggcgtactacgatggctgcatcagcgttgatttaagcgccatcaaaccaatgattgcgctgccgttccacccgagcaacgtgtatgaaatcgacacactgaaccagaacctgaccgacattctgcgtgagattgaaattgagtccgaacgcgtggcgcacggtaaagccaaactcagcctgctggataaagtggaaaatggtcgcctgaaagtgcagcaggggattatcgcgggctgttctggcggtaactacgaaaacgtcatcgcggcggcgaatgcactgcgcggtcaatcctgtggcaatgacaccttcagcctggcagtttacccgagtagtcagccggtgtttatggatctcgccaaaaaaggtgtggtagcagatttgattggcgcaggcgcaatcatcagaaccgcgttctgcggcccatgctttggcgcgggcgatacgccaatcaacaacggtttgagtattcgccacaccacgcgtaacttcccgaaccgcgaaggctctaagccagctaatgggcagatgagtgcggtggcgttgatggacgctcgttctatcgctgcgactgcggcaaacggtggctatttaacctctgccagcgaacttgattgctgggacaacgtgccggagtacgccttcgatgtaacgccgtataaaaaccgtgtttatcagggctttgtgaaaggggcaactcagcaaccgctgatttacgggccgaacattaaagactggccggaattgggtgcgctgactgacaatatcgtcctgaaagtgtgcagcaagatcctcgacgaagtgaccaccaccgacgaactgattccttccggtgaaacctcttcttatcgtagtaatccgattggtctggcggagtttaccctgtctcgccgcgatcccggttatgttagcagaagtaaagcgactgctgagctggaaaatcagcgtctggcggggaatgtcagcgagctgacagaggtgtttgcgcgcattaagcagattgctggtcaggagcatattgatccgctgcaaactgaaattggcagcatggtctatgcggtgaaaccaggcgatggttctgcgcgtgaacaggcggcgagctgccagcgtgtgattggcggtctggcgaatattgccgaggagtacgcgactaaacgctatcgttctaacgtcatcaactgggggatgttaccgctgcaaatggcggaagtaccaacctttgaagtgggggattacatttacatccctggcattaaagcggcgctggataatccgggtacgacgtttaaaggttatgtgatccatgaagatgcgccggtaacggaaattacgctctatatggaaagtctgactgctgaagagcgcgagattatcaaggcgggtagtttgattaacttcaataaaaaccgtcagatgtaaaaagcgccatgtgaatgtaggtcgcattcggcacttattgtcggatgcgatgcttgcgcatcttatccgacctacgaatcgcatcgaatctgtaggccagataaggcattttcgcagcatccggcacttattgtcggatgcgatgcttgcgcatcttatccgacctacaaatcgcatcgaaccgtaggccggataaggcgtttacgccgcatccggcaaatagttaattgcccttacttcttcgcctctgcaaccactttactacccacgccgcggttattgtattcccacatgcggttgtagttagtgtcattcagattgcgctgtatttcgtcgttatcatctacgctgccggtattacccgcaaacggacgattagagatcaccgcatcggcccacggtttagccgtgttaaaaccttcgttgatggcgctatcacggatcaccacctgaccgttggtattggcatcaacatccaggctgcggcccagttgcgccacaccatcaccgaaagcattgaaacggctgtttacggcgaggaaaccgtagtaaatgttggacagcgtagccggtgcaaacacatacgcttcttgctgagtacgactgttcaccacgcggaattcggtgttatcgaacaccactgcgccgcgaccagaaacgatatccacatccccttcaatgtagctgttggtcaccagcgtacgcggctgacgattcgtttccagacggttctgcacaccgctgttggtgacaaagaaggtgttctgacgaccgagaatgttaacgttgttaatctgtacctggtcaccatcagtacgcagtgccaccgccggatggttacctgcatctacgctatcgcccagcgtgttttcgatggtcagattttgcagttgcaggccattgttttgactccagaagaccgcagagcagagaacaccgatactgtcgctgcgtttgctctggcagctatcgtacatataccacgctggtttacctggcatatatttgccgcgcgggttgacgtcgtgacgccagtcggcagggctcatgccaccatcaagggaaagcccaatcttcacatcaatcggtttttcacctgtaccgtacagagtaattccacccggagcggcagggacatataccgttccctgatactcaccaggcatcacggcaatatactggcgcttgttggtacgcttgataattgccgcatctaccgccgcctgaatcgtggtatgcgttacaccttgagtgcccgccgggccgacaacaaagtcaggttgcgcaggcagggtaatcggggaaggattccacgctgcagcacctggtgtcagggatgcaaaatagtgttgagcatcgaaattctgcgcttcttttgcgctcagaatcgggcgagaagaggtaccaggcgcggtttgatcagaaggacgttgatcgggcggggtactgctacaggcggtcagcgtcacgccaaaagccaatgccagcgccagacgggaaacactaaatgtgttcacaggttgctccgggctatgaaatagaaaaatgaatccgttgaagcctgcttttttatactaacttgagcgaaacgggaaggtaaaaagacaaaaagttgtttttaatacctttaagtgataccagatggcattgcgccatctggcagagtgattaactaaacatcgcagtaatgctggcgcttgccagagagtggaaatgaacgttaaacccgaccatcgcgccgctggcaccttcatcgacatcaatacgttctatatccagcgcgtgaacggtaaaaatgtagcgatgagtttcgcctttcggcggtgctgcgccatcgtacccggttttaccaaagtcggtacgcgtctgcaaaacgccgtctggcattgctaccagaccagagccaaacccttgcggtaatacgcgggtatcagcgggtaagttaacaactacccagtgccaccagccggagccggttggcgcatccgggtcgtagcaggtgacaacaaaacttttcgttcccgcaggaacatcatcccacgccagatgcggactaatattatcgccatcgtaacccatgccgttaaagacatgacgatgcggcaatttatcgccatcgcgcagatcgttactgatgagtttcatgaaccctcctttcttgtttgcagaaagtgtagccagaaaccctcacgcggacttctcgttattggcaaaaaaatgtttcatcctgtaccgcgcggttaaccgctgcggtcagacgctgcaactgttgcgggagaataatatagggcggcatcaggtaaatcagtttgccaaaaggccggatccagacaccctgttcgacaaagaatttttgcagcgccgccatattcaccggatgagtggtttcgaccacgccaatggcccccagtacgcgcacatcggcaaccatttcggcatcacgggcgggggcaagttgctcgcgcagctgtacttcaatatccgccacctgttgctgccagtcgccagattcgagaatcgccaggctggcgtttgctgccgcgcaggccagcggattgcccataaaagttggcccatgcataaagcaaccggcttcaccgttactgatggtttctgcaacctcgcgcgtggtgagtgtggcggaaagggtcattgtgccgccggttaaggctttaccgaggcacaaaatgtccggcgcgatttctgcatgttcacaggcaaacagtttcccggtacgaccaaatccagtggcgatctcgtcggcaatcagcaagataccttcgcgatcgcatattttgcggattcgttttaaccattccggatggtacatgcgcatcccgcctgcgccctggacaatcggctcaatgatcaccgccgcgatttcatgacgatgcgccgccatcaggcgggcaaagcccaccatatcgcgctcatcccattcgccatccatgcggctttgcggggcgggagcaaacaggttttctggcaggtagcctttccacagactgtgcatactgttatccggatcgcacacgctcatcgcgccaaaggtatcgccatgataaccattgcggaaggtcagaaaacgctggcgcgcttcgcctttggcttgccagtactgcaacgccattttcatcgccacttccaccgctacggaaccggagtccgcgagaaaaacgcactccagcggttgcggcgtcatcgccaccagtttgcggcacagctcaatggctggcgcatgggtgataccgccaaacatcacatggctcatggcatcaatttggctcttcatcgccgcattaagctgcgggtgattgtagccgtggatcgccgcccaccaggagctcataccgtcaaccaggcgtctgccgtcagacaaaatcagctcgcaaccttcggcgctcaccaccggataaaccggcagaggggaggtcatggatgtgtatgggtgccagatatggcgttggtcaaaggcaagatcgtccgttgtcataatcgacttgtaaaccaaattgaaaagatttaggtttacaagtctacaccgaattaacaacaaaaaacacgttttggagaagccccatggctcaccgcccacgctggacattgagccaagtcacagaattatttgaaaaaccgttgctggatctgctgtttgaagcgcagcaggtgcatcgccagcatttcgatcctcgtcaggtgcaggtcagcacgttgctgagcattaagaccggagcttgtccggaagattgcaaatactgcccgcaaagcagccgctacaaaaccgggctggaagccgagcggttgatggaagttgaacaggtgctggagagcgcgcgcaaagcgaaagcggcaggaagcacgcgcttctgtatgggcgcggcgtggaagaatccccacgaacgcgatatgccgtacctggaacaaatggtgcagggggtaaaagcgatggggctggaggcgtgtatgacgctgggcacgttgagtgaatctcaggcgcagcgcctcgcgaacgccgggctggattactacaaccacaacctggacaccagcccggagttttacggcaatatcatcaccacacgcacttatcaggaacgcctcgatacgctggaaaaagtgcgcgatgccgggatcaaagtctgttctggcggcattgtgggcttaggcgaaacggtaaaagatcgcgccggattattgctgcaactggcaaacctgccgacgccgccggaaagcgtgccaatcaacatgctggtgaaggtgaaaggcacgccgcttgccgataacgatgatgtcgatgcctttgattttattcgcaccattgcggtcgcgcggatcatgatgccaacctcttacgtgcgcctttctgccggacgcgagcagatgaacgaacagactcaggcgatgtgctttatggcaggcgcaaacagcattttctacggttgcaaactgctgaccacgccgaatccggaagaagataaagacctgcaactgttccgcaaactggggctaaatccgcagcaaactgccgtgctggcaggggataacgaacaacagcaacgtcttgaacaggcgctgatgaccccggacaccgacgaatattacaacgcggcagcattatgagctggcaggagaaaatcaacgcggcgctcgatgcgcggcgtgctgccgatgccctgcgtcgccgttatccggtggcgcaaggagccggacgctggctggtggcggatgatcgccagtatctgaacttttccagtaacgattatttaggtttaagccatcatccgcaaattatccgtgcctggcagcagggggcggagcaatttggcatcggtagcggcggctccggtcacgtcagcggttatagcgtggtgcatcaggcactggaagaagagctggccgagtggcttggctatagccgggcactgctgtttatctctggtttcgccgctaatcaggcagttattgccgcgatgatggcgaaagaggaccgtattgctgccgaccggcttagccatgccagtttgctggaagctgccagtttaagcccgagccagcttcgccgttttgctcataacgatgtcactcatttggcgcgattgcttgcttccccctgtccggggcagcaaatggtggtgacagaaggcgtgttcagcatggacggcgatagtgcgccactggcggaaatccagcaggtaacgcaacagcacaatggctggttgatggtcgatgatgcccacggcacgggcgttatcggggagcaggggcgcggcagctgctggctgcaaaaggtaaaaccagaattgctggtagtgacttttggcaaaggatttggcgtcagcggggcagcggtgctttgctccagtacggtggcggattatctgctgcaattcgcccgccaccttatctacagcaccagtatgccgcccgctcaggcgcaggcattacgtgcgagcctggcggtcattcgcagtgatgagggtgatgcacggcgcgaaaaactggcggcactcattacgcgttttcgtgccggagtacaggatttgccgtttacgcttgctgatagttgcagcgccatccagccattgattgtcggtgataacagccgtgcgttacaactggcagaaaaactgcgtcagcaaggctgctgggtcacggcgattcgcccgccaaccgtacccgctggtactgcgcgactgcgcttaacgctaaccgctgcgcatgaaatgcaggatatcgaccgtctgctggaggtgctgcatggcaacggttaataaacaagccattgcagcggcatttggtcgggcagccgcacactatgagcaacatgcagatctacagcgccagagtgctgacgccttactggcaatgcttccacagcgtaaatacacccacgtactggacgcgggttgtggacctggctggatgagccgccactggcgggaacgtcacgcgcaggtgacggccttagatctcagcccgccaatgcttgttcaggcacgccagaaggatgccgcagaccattatctggcgggagatatcgaatccctgccgttagcgactgcgacgttcgatcttgcatggagcaatctcgcagtgcagtggtgcggtaatttatccacggcactccgcgagctgtatcgggtggtgcgccccaaaggcgtggtcgcgtttaccacgctggtgcagggaagcttacccgaactgcatcaggcgtggcaggcggtggacgagcgtccgcatgctaatcgctttttaccgccagatgaaatcgaacagagcctgaacggcgtgcattatcaacatcatattcagcccatcacgctgtggtttgatgatgcgctcagtgccatgcgtagcctgaaaggcatcggtgccacgcatcttcatgaagggcgcgacccgcgaatattaacgcgtagccagttgcagcgattgcaactggcctggccgcaacagcaggggcgatatcctctgacgtatcatctttttttgggagtgattgctcgtgagtaaacgttattttgtcaccggaacggataccgaagtggggaaaactgtcgccagttgtgcacttttacaagccgcaaaggcagcaggctaccggacggcaggttataaaccggtcgcctctggcagcgaaaagaccccggaaggtttacgcaatagcgacgcgctggcgttacagcgcaacagcagcctgcagctggattacgcaacagtaaatccttacaccttcgcagaacccactagcccgcacatcatcagcgcgcaagagggcagaccgatagaaagtttggtaatgagcgccggattacgcgcgcttgaacaacaggctgactgggtgttagtggaaggtgctggcggctggtttacgccgctttctgacactttcacttttgcagattgggtaacacaggaacaactgccggtgatactggtagttggtgtgaaactcggctgtattaatcacgcgatgttgactgcacaggtaatacaacacgccggactgactctggcgggttgggtggcgaacgatgttacgcctccgggaaaacgtcacgctgaatatatgaccacgctcacccgcatgattcccgcgccgctgctgggagagatcccctggcttgcagaaaatccagaaaatgcggcaaccggaaagtacataaaccttgccttgttgtaaccattctgtatttggttaaattgcgagcgagatcgcgtcttcgattgactgcaatttaaccaattaaattctaaaataatcacgaaaaaaattttacttccgcctcatgcggcgaatgtgggaattgcccaggcggcgggggataggggctggagacagttatccactattcctgtggataaccatgtgtattagagttagaaaacacgaggcaagcgagagaatacgcggcttgcacgcgaattggcgttaaagacggctcaaagaaatatcttttattttttaactggttagataaatgcaatggcagtcactgaacaggcatctcttgccataaaactgtcatcactcatcttgacaaatgttaaaaaagccgttgctttggggataacccggtaaggccggagttttatctcgccacagagtaaattttgctcatgattgacagcggagtttacgctgtatcagaaatattatggtgatgaactgtttttttatccagtataatttgttggcataattaagtacgacgagtaaaattacatacctgcccgcccaactccttcaggtagcgactcatgagtaaaccgttcaaactgaattccgcttttaaaccttctggcgatcagccagaggcgattcgacgtctcgaagaggggctggaagatggcctggcgcaccagacgttacttggcgtgactggcagtgggaaaaccttcaccattgccaatgtcattgctgaccttcagcgcccaaccatggtacttgcgcccaacaaaacgctggcggcccagctgtatggcgaaatgaaagagttcttcccggaaaacgcggtggaatatttcgtttcctactacgactactatcagccggaagcctatgtaccgagttccgacactttcattgagaaagatgccagcgttaacgaacatattgagcagatgcgtttgtccgccaccaaagcgatgctggagcggcgtgatgtggttgtggtggcgtctgtttccgcgatttatggtctgggcgatcctgatttatatctcaagatgatgctccatctcacggtcggtatgattatcgatcagcgcgcgattctgcgccgactggcggagctgcaatacgctcgtaatgatcaagcattccagcgtggtactttccgcgttcgtggcgaggtgatagatatcttcccggcagaaagcgatgacattgcacttcgcgtggaactgtttgacgaggaagtggaacgattgagcttatttgacccgctgaccgggcagattgtttccactattccacgttttaccatctacccgaaaacgcactacgtcacaccgcgcgagcgcatcgtacaggcgatggaggagatcaaagaagagctggccgccagacgcaaagtgctgttggaaaacaacaaactgctggaagagcagcggctgacccagcgtacccagtttgatctggagatgatgaacgagctgggctactgtagcgggattgaaaactacagccgcttcctctccggtcgtggaccgggtgagccaccgccgacgctgtttgattacctgcctgccgatgggctgctggtcgtcgatgaatctcacgtcaccattccacaaattggcggcatgtatcgcggtgaccgggcgcgtaaagagacactggtggagtacggcttccgcctgccaagtgcgctggataaccgtccgcttaagtttgaagagttcgaagcattagcgccgcaaaccatctatgttagcgcgacgccgggtaattacgagctggaaaaatccggcggcgatgtggtggatcaggtggtgcgtccaaccggattgcttgacccgattatcgaagtgcggccggtggcgacacaggttgatgatcttcttagcgagattcgtcagcgagcggcaattaacgaacgcgtactggtcaccacactgaccaagcggatggcggaagatcttaccgaatatctcgaagaacatggcgagcgcgtgcgttatcttcacagtgatatcgacaccgtcgaacgtatggagattatccgcgacttgcgtctgggtgagttcgacgtgctggtagggatcaacttactgcgcgaaggtctggatatgccggaagtgagcctggtggcgatcctcgacgctgacaaagaaggcttcctgcgttccgaacgtagcttgatccagaccattggtcgtgcggcacgtaacgttaacggtaaagcgattctctacggcgataagatcaccccaagtatggcgaaagcgattggcgaaaccgaacgtcgccgtgagaaacagcagaagtacaacgaggaacacggaattacgccgcaaggcttgaacaagaaagtggtcgatatcctggcgctggggcagaacattgccaaaaccaaagcgaagggcagaggaaaaagccgcccgattgttgagccggataatgtgccgatggatatgagccctaaagcgttgcagcagaaaatccatgagctggaagggttgatgatgcaacacgcgcagaatctggagttcgaagaagcggcgcaaattcgtgaccagttgcatcagctgcgtgagctgtttatcgcggcaagctaacaggatagcgaagaagactgatgacaaacggaaaacagcctgatgcgctacgcttatcaggcctacattttctccgcaatatattgaatttgcgcggtttgtaggccggataaggcgttcacgccgcatccggcataaacaacgcgcactttgtcttcaataggaagccggaattttccttcggatttccgttaacctaaagcctgtaacgccttttccagcgcgttatgtaacaactggcggtcatgacgatacggaatatcgctggcctccagtacctcctggatcacaatccgctctttcaccgcgctgacatccacttttggcccgacgatgaccgcatcaatgacctttttaccaacatactgctccataattgccagcttgctttccagcttcaaattagccgcaggtaaactcaactcacgccccagattgccgatataaaccatcggcgctggcgtgcggcgtaatgcctgggcgatttccttcagcagcagaattggcatcaggctggtataaaaactgccaggcccaataatgatgagatccgcttcattgatagcgtgaaccgcctcacgcgttgcgggtacattaggcgttaacaataactcttgaatcggcgtagttaactggtcgatattgacctcgccgtaaacttcatgcccctgatcgtcaatcgccatcagatcaacaggatgctcactcattggaatcaaatgcgtatccactttcagcagattacgaattaaattgatggcttccagaggccgcacgctaaggtgatccagcgcctttaacatcaagtttccgagattatgaccggaaagttcgccattgccaccaaaacggtattcaaacatcgcggaggcgacgctcggttccgttatcagctggttgaggcagttgcgcatatcgccccaggcaatgccgccttcactacggcgaatacgccccgtgctgccaccattatcggtggtggtgacgatacccgttaaacgagaacccaaagagctaagactactgagaacgcgtcccagtccatgccctccgccgagagcaacgacacgatcaagatcagccagcgtacgattgcgcatatagtttcctggagtcagattatccgcgctacagtagcgcaaattgcggggaaacagcaattaacctgccaatattgaggatacaaactattttcttctacctctaaaggacgatgcacgctatgcctccctgatgatgtatatcaaagtaaaaccgccattttcccttattctgtagcgaaatagcacgatcatgacgctatatacatgattacatagcgaaagtgtggatggtaaaaatctcatttacacgctagtatcggcataaccactaaacactctagcctctgcacctgggtcaactgatacggtgctttggccgtgacaatgctcgtaaagattgccaccagggcgaaggaagaaatgacttcgcctcccgtatctggaaaggtgtacatggctagtcaactgactgatgcatttgcgcgtaagttttactacttgcgcctgagcattaccgatgtgtgtaactttcgttgcacctactgcctgccggatggctacaaaccgagcggcgtcaccaataaaggctttcttaccgtcgatgaaattcgccgggttacgcgcgccttcgccagactgggcaccgaaaaagtgcgcctgacaggaggagagccgtctttacgccgcgactttaccgatatcatcgccgctgtgcgggaaaacgacgctatccgccagattgcggtcacaaccaatggttaccgtctggaacgcgatgtggcgagctggcgcgatgcgggacttactggcattaacgtcagtgtcgacagtctggacgcccgccagtttcacgctattaccgggcaggataaattcaaccaggtcatggcagggattgatgctgcatttgaggccggttttgagaaggtcaaagtcaataccgtgctgatgcgtgatgttaatcatcaccagctcgacacctttctgaactggatccagcatcgccctatccagctgcgtttcatcgaactgatggaaacgggcgagggcagcgagctcttccgtaagcatcacatctctggtcaggttctgcgtgacgagctactgcgtcgcggctggatccaccaattacgtcaacgcagcgacggtcccgcgcaagtcttttgccatccagattacgccggagagattggccttatcatgccgtatgaaaaagacttctgcgccacttgcaaccgcctgcgcgtttcctccattggtaaactccatctctgcctgtttggtgaaggcggcgttaacctgcgcgatctgctggaagacgatacccagcaacaggcgctggaagcgcgtattagtgcggcgctgcgggagaagaaacagacccatttcctgcatcaaaacaacaccggtattacgcaaaacttaagctacattggcggctaaaacgtcaaaaggagagatcagatgagtcaggtaagcactgaatttatcccgacccgtattgctattcttacggtttctaatcgtcgcggtgaagaagacgatacctccggtcactatctgcgcgatagcgcgcaagaagcgggccatcacgttgtcgataaagccattgtgaaagaaaaccgctacgctattcgcgctcaggtatctgcgtggatcgccagcgacgatgtacaagtggtattgattacgggtggtactggcctgacggaaggtgatcaggctcccgaagcattgctgccgttgttcgaccgtgaagttgaaggttttggtgaagtgttccggatgttgagctttgaagagattggcacttccacgttgcaatctcgtgcggtagcgggcgtcgccaacaaaacgctgattttcgccatgccgggtagcaccaaagcgtgccgtaccgcatgggaaaatatcatcgcgccgcagctggatgcccgtacgcgtccgtgtaatttccatccacatttgaagaaataagtatgagccaactgacccatatcaacgccgctggcgaagcgcacatggtggatgtctccgccaaagcggaaaccgtgcgtgaagcgcgggcggaagcctttgtcaccatgcgcagcgagacgctggcgatgattattgatggtcgccaccacaaaggcgacgtatttgccactgcgcgtattgccggtattcaggcggcaaaacgcacctgggatctgatcccgctctgtcatccgctgatgctcagcaaagttgaagtcaatttacaggccgagccggagcacaatcgggtgcgtatagaaaccttatgccgcctgaccgggaaaaccggtgtcgaaatggaagcattaaccgcggcctccgtggcggcgctgaccatttatgacatgtgcaaagcggtgcaaaaagatatggtgattggtccggtacgtttgctggcgaagagcggcggcaagagcggtgactttaaggtggaagcggatgattaaagttctttttttcgcccaggtgcgcgagttggtgggaacagatgcaaccgaagtggctgcggatttcccaactgttgaagcgttacgccagcacatggctgcgcagagcgatcgctgggcgctggcgctggaagatggcaaattactggctgccgtcaaccagacgctggtgagttttgaccatccgctgactgacggcgacgaagtagctttcttcccgccggtaaccggaggttaagatggcagaaaccaaaattgttgttggtccgcagccgttcagcgtaggagaagagtacccgtggctggcggagcgtgacgaagacggtgcggtagtcacctttactggtaaggtgcgcaaccataacctgggcgacagcgtcaacgcattaaccctcgaacactatccggggatgactgaaaaagcactggcagaaattgttgatgaagcgcgtaaccgctggccgctggggcgcgtcactgtgattcaccgcatcggggaattatggccgggcgatgaaatcgtttttgtcggtgtcaccagtgcgcatcgcagcagtgcgtttgaagccgggcagtttattatggattatctcaaaacccgcgcaccgttctggaagcgcgaagccacgccggaaggcgaccgctgggttgaagctcgggagagcgatcagcaggcggcaaaacgctggtaattttttgttagccggataaggcaccgctgcgtccggcaatttcaccgctcagtacatacgtttacgctgcgtcgatgcacagcctcatcattttgcagtatccttaagatattccttatatcttcaggagatcgtcatggacagattcccacgttctgatagtatcgtacaaccccgggctggcttgcaaacttatatggctcaagtctatggctggatgaccgttggcttgttgctgaccgcatttgttgcctggtatgcggctaattccgcggccgtgatggagctgttgttcactaaccgtgtctttttaatcggtctgatcatcgcgcaattagcattggttattgtgttaagtgcgatgattcaaaagctgagcgcaggtgtaacgacgatgctctttatgctttatagcgcgctgacgggtcttacgctttccagtatattcattgtctataccgctgcttctatcgccagtactttcgtcgttactgccgggatgttcggcgcaatgagcctgtacggttacaccacgaagcgcgatttaagtggctttggcaatatgctgtttatggcgttaatcggcattgtgctggcaagcctggtcaacttctggttgaaaagcgaagcattgatgtgggcagttacctacatcggcgtgattgtctttgtcggattgacggcgtatgacacgcagaaactgaaaaatatgggtgagcagattgatacccgcgacacgagcaacctgcgcaaatattccattcttggcgcgttaaccttgtatctggacttcatcaacctgttcctgatgttgttgcggatcttcggcaaccgccgttaattctttttcaccatcactatcccggccatgtgtcgggatttttttcttactaaaaacgacacttaacaagtaccaggtataaaatatgccttatggacgagcggaagcgttttctgtatccataaatgcaaaagtattttgtatgcgtggttttaaatttattgatggtgaatattaatattttttctaaggataactaaaagaatggaaagttacagccaaaacagcaataaattagattttcagcacgaggccaggatattaaacggtatatggctcattaccgctttaggtttggtggcaaccgcaggactagcctggggagctaagtatatcgaaattacggcaaccaaatatgatagtccaccaatgtatgtcgccatagggttattattactttgtatgtatggcttaagtaaggatatcaacaagataaatgccgccatcgcgggcgtaatatatctgtttttactctctttggtggcgattgtcgttgcaagtttagttcctgtatatgccattatcatcgtgttcagcactgcgggcgcgatgtttttaatcagtatgctggccggtttattatttaatgttgatcctggttctcaccgttttatcattatgatgacgttgacagggttggccctggtaatcatcgtgaatgcggcattaatgagtgaacggcccatttggataataagttgcttaatgattgtgttatggagtggcattatcagccatggacgaaataagctccttgaattggcggggaaatgccatagtgaagagttgtggagtccggttcgttgcgcttttacaggtgcattaacactctattactattttatcggcttctttgggatacttgccgcgatagctataacgcttgtctggcaaaggcatacgcgtttttttcattaaccgtaaatgcacatactaaagaacttaactaaacttcacatcgccgcttcatttttcgcccgtagcttcttcgcctggctttccagcaacaggtaacagatcagcgccagcagcagtgggataaagtaatacagcacacggtaagcgagtagggcggcgataattgtacctttggaggtatgctccccagccagtagtgcgataaacaccgcttccagcacaccgatccccgccggaatatgcacgatgacgccagcaatactactaaccagtaacacgcccagtacaaagaaatagttcacgctttgaccaagtaacagccagataatcgcccccattaccatccagttaacgctggaaatcagcatctgagcgagggcgaatttccaactaggcagcaccagcttttgccctttgatggtcatatggcggtgcttcgcgaaagcgcaaaaccacaaataaaccgcgataatcatcagtaagccaatgccgagaatacgcagcgtagtttgatcgacataccagtgatccggcaactccaccacgcctgcggtaaagataatccctgccagtaaaatgtagcccagccagttggtggtaatactgaggctgaaaatccgcgtaatagtgctaccgggcaaccccagacgagagtacaaacgatagcgcataccaatgccgccgacccaggtactgagcgtcaggttgaaggcgtagcagataaagctcaccagcatcacctggcgcttcgccagtttgtgaccgcagtaaaagcgggcgagcaggtcatagcagccgtaaatcagatagctgacgaccaccagcccgaccgcactaagcagcgcaacgcgattgtagtcgcggatgaccttccagacctcttcccagtccacttttttggcgtagaccaccagcaacacaatcaccgcgataaaaaacagccaggtgaggatcttctttgctaagcgccagcgcgggtgacttttactcatcagggttttacccccgtgttttcagtttctacccgatcctgcgtttccattgtcggttgtgcgggcggatcaacctgcgccagacgtggcgtgtgtgccggaagccagccaaccagcgccgggaagtggcgtaaaaagtggaacgccagcacgcttttggtcaggttccaccaggtgcgtttgggcagcatggtttcatccacctgctgacaatctgcggcaataatgccgttcagattatcgcgcagcgtctggttaaaatgacgatcgtggatgatgacatttgcttcgagattcagactcaaactgagcggatcgagattactggaccctactgtcgcccagtgatcgtccatcaatgccactttgccgtggagcgggcggcggcggtactcaaaaacctgaacgccgcctttaaccagatagttatacagcaagcgcgcaccgactctgacaatcggcatatccggttcgccctgaatgatcagtttgatccgcaccccgcgccgtgccgctttacgcaaggcgtgtaaaaatcgatagccggggaagaagtaggcgttggcgataatcacttcccgccgcgcctgagtgagcattttcaaataatggcgttcaatatcatcgcgatgttcttcgttatcgcgccagaccagcaatacctgcgcttctcccggctggcggttctcttccgctttgtgatgacgtcgccaccagcgtcgtgccgcgctctgtccaggcaggttttccagctcaaactggagaatatcttcgacaatcggcccttcaaggcgtaccgcgtaatcctgtttagcctctggaccgtagctggacatatgctcggcggagtaattcagcccgccaataaaggctatacgcgcgtcgatcaccacaattttgcgatgcatccggcgaaacacattggtgcgcataccaaaaaggcgagggcggggatcgtagtagcggaacactacgccagctgccgtcagttcattgacaaactcatcgctgagatccgggctaccgtagccatccagcaagacttccgctttaaccccgcgttgcgctgctgccagtagtgccgcatgcagttgtttgccgacgtcatcctcaaaccagataaacgtttcaagaatgatgcgttcttgtgcctcgccaatcgccttaaacaccgcgggataatattgctcgccgttttccagcaactggatcttattgccttcgcgccagctacatttcataaatgaatctccgcacttaaaggggcatgatcagaaaggtgtcgccatgtccgcagcggcaacgcggttggcgcgctggcgctggcatttttgacgtagatcctgtccagtcgtagtagaggaaattgcaccggaaacgtgcgcgccgggcgtccgtgggcgcgggtaaaaatctcatccagtccggcctgcacttttaacggatgattagctttttgccgccagtcattgaaatcacccgccaccaataccggttcgccgtccggtagctcattcacccattcggcgagcatcgcaagctgcgcctgacggtgcgcctcacgcaggcccagatgtacgcacatcacatgaatcgcttttccggtcatcggcggcacaatgcggcagtagagcacgccgcgcttttccgcaccatcgacgctaacatcgcgattctcataatgttcaatgggataacggctcagtacggcgttgccgtgatgcccttccgggtatacggcattgcgaccgtaggcaaaatcgctccacatagtgtcggcgagaaactcgtagtggctggtatcgggccagttttccacatgcagcggatgaacttcgtgcgcgcccatcacttcctgcaggcaaacaatatcggcgctgacggtacgcacggcgtcgcgaagttccggcaaaatgaagcgtcggttaaacgcggtaaagcctttgtgaatattgatggtgagcaccttgaagctaaattgttgtgtttgatcgggcataattttcctgtctttgcctcttatctcattgaaatagtgtagtcggcgtcacaaaaaggtgcggtcttacggaattttccgtaaagttcggtactctgagtaagtagagataaattcttcaggagagaagccatgaagtggcaacaacgtgttcgtgtcgcaacgggtctaagttgctggcagattatgttgcatttactggtagtggcgctgctggtggtgggctggatgagtaagactctggttcacgtcggcgtgggattatgcgcactgtattgtgtcacggtagtgatgatgctggtgtttcagcgccaccccgagcaacgctggcgtgaggtggcagacgtgctggaagagctgaccacgacctggtattttggcgcagcgctgattgtgctgtggctgttgtcccgcgttctggaaaacaactttttgctggcaattgcagggctggcaatccttgccggcccggcggtagtgtctttgctggcgaaagataagaagttacatcaccttacgtctaaacatcgcgtacgccgctgattacatcaccttacgtctaaacatcgcgtacgccgcactccctgtcgtggccgttatcaccagtagcggccacaaactattccacacaatatccagactcgcatccttcaaataaatctgcttggtaatgtccgtaaagtggcgaatagggttaatccacgtcaggttttgcagccataccggcatgttttccaccggagaaacgtaaccggaaaggagaatggcgggcatcataaagacaaacacgccgataaacgcctgctgttgtgtactacagagactactaatcaacagaccgaatcccaccaggcttaaaccataaatcaccatcgtaaagtagaacagcgccaggcttccggcgaaggggatttgatacgcccagataccaatcgccagcacaatggtggcctggaaggtggcgacaattaacgccggtacggctttgccgatgaagatctgccaggtggtgagcgggctaaccagtagctgatcgagcgtaccttgttcacgttcgcgggcgacggaaagactagtgacgatcattacgccgatagtggtgatcatggcgatcagactcggcaccacaaaccatttgtagtcgagattcgggttataccagttgcgtaccaccagctcgctgttgttaggtttcggttttccttccagcagctcctgctgataatttttgacgatctgttgcaggtagttggcggcaatttgcgcactgttggagttacgcccgtcgaggatcaactgcaaaggcgcggtctggaaggtatccagtttgcggctgaagtcagccgggaaacgcaccagtagtaacgccttttgtgtgtcgatggttgggcggatctcctgtgggcttttcagcagcagcacatgagtaaaggcgctggcgcgggcaaaacgttgggtcagctccacgctatgctcgccgttatcttcatcgtagatggcgatggtggcgttagtcacttccagcgtggcggcgaacgggaacaggatcacctgaattagcacgggtaaaatcagaatcgcgcgggtttgcggttcgcgcagcaagctctgcaactctttgcggattaacgtccataagcgatgaaacatgctcttctccttaatccagccgacgtttggttttcagccacgtcaggccgataaacatcaccgcgctagcgatcaaaaacagcacgtttaccaccagcaccactggaatattcccggcgaggaacaggctttgcagggtgctgacgaaataacgagcgggaataatgtacgtcaccgcgcggatcaccgcgggcatactgtcgatctgaaaaataaagccggaaagcataatgctcggcagaaaagcggcgttcagggcgacctgagcggcattgaactggttgcgggtaatcgtggaaatcagcagccccatccccagggtactgagtaaaaacaggctggagataaaaaacagaatcagcaggctcccgcgatacggcacgccgagaataaacacactcaccagcatacacagcaacatcgccagcatcccgagaaagtaataagggatcagcttacacagcagcagttccgtgcgggtaatctccgtagagagcagagcctccatggtgccgcgttcccattctcgcgccaccaccaggctggtgagaatcgcgccgatgaccgtcatgataatggtcaccgcaccggggataatgaagtgctggctaatcgccgccgggttaaaccagtagcgggtttgtacatcaataagcggttcaaaagtctgcccgttgtcctccgctcgctgcatttgccagatctgccagatcccttcgacatacccctgtacaaagttagcggtattcggctcactgccgtcggtgatcacctgaatcggtgcggtggcgttggcgcgctccatctgttccgcaaaatccaccggaataaccaccagaccgcgaattttccccgcctgcattttggcgatcagttcctgacggttatcgctgatggtggcgtcgatgtaggggctaccggtcatggtgtgggtgaaatccagcgccgcttcgctacgctgttccagtaaaatcccgacccgcagcttgctggagtcgaggttaatgccgtaaccaaaaataaacagcagtagcagcgggatcactaccgcaatcagccagctactcggatcgcgaacgatctgccgcgtctctttaacgcacagcgcccgtacgcgacgccaggacaggatcgggttactcattgctatgctccttatcccagtcgtggatcaactgaataaaggcttgctccatggtgggatcgggttgctcatcgttagcgctctgtgctttcaaatcgtccggcgtgccgctggcgattaatttcccgcggtacaccaggccgatgcggtcgcaatattccgcttcatccataaagtgggtggtgaccatcaccgtgacgcctttctctaccatgctgttgatgtgcagccaaaattcacggcgggtgagggggtcaacgccggaagtcggttcgtcgagaaacagaatgtccggttcatgcatcaggctacaggccagcgccagccgctgtttaaaacctaatggcagttcatcggtggcgtgggaggcgatacttttcaggccgaacgcctcgctcatgcgggagattttttcgttctgcgcccgaccgcgtaagccatacacaccagagaaaaagcgtaaattctgttcgaccgtcaggttaccgtagaggctaaatttttgcgccatatagccgagatgctggcgcgctttaccggaactctctttcagatccatccccagcaccagcgcctggccggaagtcggcaccagcaaaccgcacatcatcttaaaggtggtgcttttacccgcgccgtttggccccagcaaaccaaaaatctccccacgtttaacggcaaagttgacgtgatcggtggcggcaaaatccccaaatttcttggtcagttctttcgcttcgatcaccgtctcgccgggtgtgccttctaccgtatgtaatattgcgcccagcgggctttcgctggttccggcaccgcccagcaaatcaataaacgcatcttcaaaacgcggcgtagtttcgttgatgttgatttccggcatcccgtcggcatggcgaatatcgtctggtgtggcctcttttttgaggatcagacgtacgcttttcccctgaatcatgccgtcgctgacctgcggcagtttcaaggcgcgttgcaacagtttgcggttgccctcgtgtggactggtcatcagaaagctgcgtccggccatggtttgtgtcagggcttttggttctccctgatacagcaactcgccttcgttcatcagtaacacgtcacggcactgctcggcttcgtcgagatagctggtactccagaggattaacatcccttcgcccgccagctcatgcaccatctgccacagttcgcgccgactgatagggtcaacgccgacgccgggttcatcgagcagcaacactttcggttcgcccaccagggtacaggccagaccgagtttttgtttcatcccaccggagagcttgcccgccaggcgtccggtaaacggcccaagagacgtaaactccagcaggcgagcaaaagtttgcttacgtgcctcgccggtgacgctgcgcaaatccgcgtacagattgaggttctccatcaccgtgagatcttcatacagaccaaatttctgcggcatataaccgagcacggcgtgcagcgcgccgtcgtttttgatcggatcaaagccaatcaccgtggcactgccgctgtcgggtttcagtaatcccgccaacatccgcatcagcgtggttttacctgcaccgtccggccccaccaaccccgtcacataaccggcgtgaatggtacaatcgagcggcgcgacggcgggcttgtccatgcccggaaagcgtttttccaggccgttcagcgtgataacggcatcattcatgtcctgcctcgtcaccgaattgtaccgtcactggcattccctggcgtaacgcatcatcggcgtcggtcaccacaatacgcaggcgatagacgaggtcggtacgcagatccggcgtttcgacggttttcggggtaaattcagcagtcgggctaacgaaaccaatctgcccgtgatacggcttgtccgggcgaccatcggtataaagcagcactttgcgccccggctgggcctggtcaagattacgttcatcaacataagcgcgcacccacaccggacgcgttagactaacggtaaacaccgtgccaccttcattgaggaccgtgcctggctccaccgcgcgcgttaacagcgtgccatcagacggggctatcaacgtactgtcctgtaaattcaactccgcctgcgccagttgcgcctgcgcctgttcgaggctggctttcgcctgagcgatgtcctgttcacggttaccggaacggtactgacgcaatttatcctgtgcacttttcagcgttgcctgcgcctggtcgcggctggagcgggcattttccaggtcatttgcgctaatagtgcggcttttccacaacccttgctggcggttatagaagttctgcgcatagtcataggcggcttgcgcctgtttcaccgctgcggcggcctgagcgatttcttcattgcgatacccggcaagcatcaggtcatactgcgcctgtgccacgctaacacccgctttcgcctgcatcagggcaatctcatacggcttgtgatccagttcgcccagcacctggcccgctttgatagcatcaccttcgtccaccgccaggctttcaacgcgccccccaacacggaaactaagatttaccgtacgaatatccacgttgccatacagcgtcaggccgttatcctggcggctttgataccaccagtagcctccggcaaccacggcggcaagtaccactaccgccaatccgatcacgacaggttttttcatcactacaaactcctttgcgataattacaaactcctttggcttaatccttgcaaaatcaggtcgatatgacaggtcaccgtctggttgatcagttcggtcttttcttcatcgaacgcggtccagccggtacgtaacagaattgtttctttgccaagacggaacgccagaatctcaccaatcaacgcatgggtatgaaggatcatgcgggtgtcattggcgtcgcagccggtccaggcggcaatcaggcgtgtcaggtggctgtgtagcggactaatcacctgttcgtgcaccaggtggtaggctgccgtgggagagagctgctcacgggagataaacttgctgaggttgacggtgtcatcctgggtgagcagcttaatcatgttcctgcaggcgcgaaggatcagttcacggatggcagcccgatcaggctgtggttgcgcgaacaagcgttcggcttcctcggcatgcggacggaactgctcgccaataaaatcggcaatccactgggcgcaggcgaggtacaaatcttctttgctaccgaagtagtaggtgatggcagcgatattctgcccggcctgggcggctatctcgcgagtggtggcgttcattccatattcaccaaactgcgccagtgcggcagcaatcagctgttttttcgcctgttcacccttgattgtcatggcaggattattcatcgcacagtccattcttaatcaaatgattgattaagattatgactccataggggagttgtccagtatggctaagaattttagcaacgccagtcacagggataatttatgcgctgcgtcacaaaaactgctacactccgctccctcatgacattgtggtttttgtcattttccttttcagtatctccctgaaaactacaccggtaacggtcggggcggttcggagtagttatgtctttcgattctttgggtttaagccctgatatcctgcgcgccgttgccgagcagggttaccgtgaacccacccctattcagcagcaggcgatccctgcggtgctggaaggccgcgacctgatggctagcgcccagaccggcaccggcaaaacagcgggctttacgctgccgctgttgcaacacctgatcactcgccagccgcacgccaaagggcgtcgtccggtacgtgcgctcattcttaccccgacccgtgaactggcggcgcagattggcgaaaacgtccgtgattacagcaaatacctgaacattcgtagcctggtggtgtttggtggtgtgagtattaacccgcagatgatgaaactgcgtggcggcgttgatgtgctggtggcaaccccgggacgtttgctggacctggaacatcagaatgcagtgaagctggatcaggttgaaatcctcgtcctcgatgaagctgaccgcatgctcgacatgggctttatccacgatatccgtcgcgtgttaacaaaactacctgcgaagcgccagaacctgttattctccgcgaccttctctgacgatattaaagccctggcggaaaaactgttgcacaacccgctggaaatcgaagtggcacgccgcaataccgcgtctgatcaggtgacccagcacgttcactttgtcgataagaaacgcaaacgcgaattgctgagccacatgattgggaaagggaactggcagcaggtgctggtgtttacccgtaccaaacacggcgctaaccatctggctgaacagctcaataaagatggcatccgtagtgcggcgatccacggcaataaaagccaaggtgcgcgtactcgtgcgctggctgattttaaaagcggcgatattcgtgtactggtggcaactgacatcgctgcgcgcggcctggatattgaagagctgccgcacgtcgtcaactatgaactgccaaacgtacctgaagattatgtccaccgtatcgggcgtaccggtcgtgcggctgctaccggtgaagcgttgagcctggtgtgtgttgatgaacacaaactgctgcgtgatatcgaaaaactgctgaaaaaagagatcccgcgcattgcgattccgggctatgagccggacccgagtatcaaagccgaaccgatccagaacggtcgccagcaacgtggcggcggcggtcgtgggcaaggtggtggtcgcggtcaacagcaaccacgccgtggggaaggtggcgcaaaatctgcaagcgcgaaacctgcagaaaaaccgtctcgccgcctcggcgatgccaaaccggcaggcgaacaacaacgtcgccgccgtccgcgtaaacctgccgctgcgcagtaatcttttatgccgggctatgcccggcatcaggctgatgaacaaacgcaaaactgcctgatgcgctacgcttatcaggcctacgtgaactctgcaatatattgaatttgcatgcttttgtaggccggataaggcgtttacgccgcatccggcatttcacaacaagcacttgtcagcaatttgagaacacgggaaaaaatttatctgttttaccgcccataagccaccgagacgttacttctctatagccaattgttcgcgcaactccattaaaaggtagcccagtcgattcttgcccttaccatgaccaccgtctccccagtaagcatcgttttccgtatgctcaaccagttttgcgggcgcggttgccagcaagagcgcacgcagttctgcatgctgttcgaatttagcgcgaagtgcttttcgcatcacctgttctttgacgctctcccagtttttacgcagaggcttagaacgatcgcgccccatgcgtgcggcgaccataggggaagaaacccgacggatctcttcgcggtatttttcatcaaggaatttttgtgcctgaaaatagtgttcactggtaggccaggttttcccgtcaaccttgatgggccaggcggcaaagttagaaaaatcaccgtagtcatcgctggtgctgtagaaatttatgatggtgtcttgcatgacgtgttggatcctttgtgctcgaacgggcattaaaccgcattatgttggtggttattgcgagccgctttccagaaacagaaaaaccattacccctgaaaaccgaaaaatgccacaatattggctgtttatacagtatttcaggttttctcatggcattaaccgccgcgcttaaagcgcaaattgccgcctggtataaggcgcttcaggaacagatccccgactttattccccgtgcgccgcagcggcagatgattgcggacgtcgccaaaacgctggccggagaagaagggcgacatctggcgattgaagcccccaccggcgttgggaaaacgctctcttatttgattcccggcatcgccattgcccgcgaagagcaaaaaacgctggtggtgagtaccgccaacgtggcattgcaggatcagatttacagcaaagatttaccgctgctgaaaaagatcattcccgatcttaaattcactgccgcttttgggcgtgggcgctacgtttgtccgcgtaatctgacggcgctcgccagtactgaacccacgcaacaggatctgctggcgtttcttgacgacgaactgacgccgaacaatcaggaagagcaaaaacgttgtgcgaagctgaagggcgatctcgatacttataaatgggatggtctgcgcgatcatactgatatcgctatagatgacgatctctggcgtcgtttaagtaccgacaaagccagctgcctcaaccgcaattgttactactatcgtgaatgcccgttttttgtcgctcgtcgggagattcaggaagcggaagtggtggtggcaaaccatgcgctggtgatggcggcgatggaaagcgaagcggtattgcctgacccgaaaaatttactgctggtgctggacgaaggccatcacctgccggatgtggcgcgggatgcgcttgagatgagcgccgaaatcaccgcgccgtggtatcggctacagctggacttgttcacgaaactggtcgctacctgcatggagcagtttcgcccgaagaccatcccaccgctggcgatccctgaacgtttgaatgcgcattgtgaagagttgtatgagcttatcgccagcttaaacaacattctcaatctctacatgcctgccgggcaggaggcagagcaccgttttgcgatgggcgaactgccagatgaagtgctggagatctgccagcggctggcaaaactcaccgagatgctgcgtggcctggcggagttatttcttaacgatttaagtgagaaaaccggcagccatgacattgtacgtctgcatcggttgattttgcagatgaaccgcgcgttggggatgttcgaggcgcaaagcaaactctggcggctggctagcctggcgcaatcttccggtgcaccggtgaccaaatgggcgacgcgggaagagcgcgaagggcagctacacctctggtttcactgcgtgggaatacgtgtcagcgatcagctggaaaggctgctgtggcgcagtattccgcacattattgtcacctccgcaaccttgcgtagcctgaacagttttagccgtttgcaggagatgagtggtctgaaagagaaagcgggcgaccgttttgtggcgctggattccccctttaaccactgcgaacagggcaaaattgttattccccggatgcgcgttgagccttccatcgacaacgaagagcagcatattgccgaaatggcggcctttttccgtaagcaggtggagagcaaaaaacatctcggtatgttggtactgtttgccagcggacgggcgatgcagcgctttctcgactatgtgacggatttacgtctgatgttgctggttcagggcgatcagccgcgttaccgtttagttgaactgcaccgcaaacgcgtcgccaacggtgagcgcagcgtgctggtgggcttacagagttttgccgaagggcttgatttgaaaggtgatctgctcagccaggtgcatatccacaaaatcgcttttccgcccatcgacagcccggtggtgatcaccgaaggggaatggctgaaaagcctcaaccgctatccgtttgaggtgcaaagcctgccgagcgccagctttaacctgattcagcaggttgggcgactgattcgaagccacggttgctggggcgaagtggttatctacgacaaacgcttgctgaccaaaaattatggcaagcgactactggatgcattaccggtatttccgatagagcaaccggaagtccctgaaggtatagttaaaaagaaagaaaaaacgaaatccccacgccgtcggcggcgttaatgatgtgagtcaggtaaggagtcgtaaatggactatcgcaaaatcattaaagagatcgggcgcgggaaaaaccacgcgcgcgatttagaccgggatactgcgcgcggtctgtatgctcatatgctcaatggtgaagtccctgaccttgagttgggcggcgtattgattgcgctgcgtatcaaaggagaaggggaagcagagatgctcggcttttacgaagccatgcaaaatcacaccatcaagctgacgccgccagcaggcaagccgatgccgattgtcatccccagttacaacggcgcgcgtaaacaggccaacctgacgccgttgttggcgattctcctgcacaaactcggttttcctgtggtggttcacggggttagcgaagatccaacccgcgtgctgactgaaaccatttttgaattgatgggtattacgccaacgttgcacggcgggcaggcgcaggcgaagctcgacgaacatcaaccggtgtttatgccagtcggcgcgttttgcccgccgctggaaaaacaactggcgatgcgctggcggatgggcgtgcgtaacagtgcacataccctggcgaaactggcgacgccatttgccgaaggtgaggcgctgcgtctttccagcgttagccatccggaatacattggacgcgtcgcgaagttctttagcgatatcggcgggcgggcgctactaatgcatggtactgaaggtgaagtgtatgctaatccgcagcgctgcccgcagatcaatctcattgaccgtgaagggatgcgggtgctgtatgaaaaacaggacactgctggtagcgagttactgccacaagcaaaagatccggaaaccacggcgcagtggattgagcgttgccttgctggcagcgaaccgattcccgaaagcctgaaaatccagatggcttgctgcctggtggctacgggtgaagcggcaactatcagcgacggcctggcgcgcgttaatcaggcattttaattcttttctcagccggatgagccatgtcatccggcttttaccccaccgcaatatgaaattcctgcatctttattgaccttcccacgcccggcgtgcagcataaaaatacaacaaacacataacataaacaggagttaaccatggaaagtggtcatcgctttgatgctcagacgctgcacagttttattcaggctgtatttcgtcagatgggtagcgaggaacaagaagcgaaattagttgccgatcatttaatcgcggcaaacctggcagggcatgatagtcatggtattggcatgatcccaagctatgtacgctcctggagtcaggggcacctgcaaattaaccatcatgccaaaaccgttaaagaggcgggggcggcggtcacgctcgatggcgatcgcgcatttggtcaggtcgcggcacatgaagcgatggcgctggggattgagaaagcgcatcagcacggtattgccgccgtggcgctacataacagccatcatatcggccgtatcggttactgggcggagcagtgtgcagcggcggggtttgtctctatccactttgttagcgtggtcggtattccaatggtcgcgccgttccacggtcgcgacagccgctttggcaccaatccgttctgtgtggttttccctcgtaaagataatttcccgctgttgcttgattacgccaccagcgccattgcatttggcaaaacccgcgtcgcctggcataaaggcgtccccgtgccgccaggttgcctgattgacgttaacggcgtgccgacgaccaatccggcggtaatgcaggagagcccgttgggtagcctgttgacctttgccgaacataaaggctacgcccttgcagcgatgtgtgaaattcttggcggggcgctttccggcggtaaaacgacgcatcaggaaacgttacaaaccagtcccgatgccattcttaactgcatgaccactatcatcatcaacccggaactcttcggcgcgccggattgtaacgcgcagaccgaagcctttgccgagtgggtgaaagccagcccgcatgatgatgataagccgattttgctaccgggcgagtgggaagtgaacacgcgtcgcgaacggcagaagcaggggattccactggatgcgggaagctggcaggccatttgtgatgcagcgcggcagattggtatgccggaagagacgttgcaggctttctgtcagcagttagccagctaaaaaaaagcccgtccagtggcggacgggcaaacaagggtaacataggatcaatgagggttagagcatatgcgtctgtcggcaaacagacagggaaatacttgtgctggacgtagcgtaaacgcctgatccgtccaacggttcggattttgtaggcctgataagacgcggtagcgtcgcatcaggcatctgttgccggatgcggcgtaaacgccttatccgtcctacgaattacttataaattaccgcagtaccgcttaatttattgttgttggtggcggaagtgatgctgtatccactggcaccggctgccgcggctttctcagccagtttcgcttccagggcatcgagggtggatgcgccatcggcagaaaccacgccgattttattcatgttctgtgcctgggatgccgttaccggttccgccgcgaacacgccaaaactcagagtactaagagccatagcagcaacaacagtattgatagttttcataattaatctctcgcaggtgatttttgtataagtgacgttgtttcgtcgatgtgatgagtatcacgtttttttacgagagataaaatcgaagagaattgaccgccttgttcaaataaattgattgatatctaacctactgataaaccatttatttgttgtacttatgaacttgttttataccgcgtggcagtcacagcagcgttaaaggcacggaatgacacgcaaaatacaaattatactcgctatgcatctcgccagttgtagttaacgtaactggctgtctttgctacctctgcgattatatcctgtataagctggtttttgtaaatctttctcctgctgacaatgaatacataagcgcacgccaggaatggcttcccgacgggcctgcgggatgggggcaccgcactcttcacattcatccaggctttcgccgcgcggaatttcaccccgagcgcgggcaatcgcatcttcaattgtactgttgatctgttcgttgacggcgtcatcgttagcccaaccggatgccatatcgacctccccatatcaatacttgtacagttaagtgtagctaatccagggacgaactcgggcagttcaagcatcagatctcgctccattcccgcagcagattatgataaagattaagcaggctcaggatctcttcactttcgccgtagcggcttttcaggctctgaatattgttgtccagttcaaacagcatggcgcgctttttatcatcgcggatcatgctctggatccacataaaacttgccactcgtacgccgcgggttacgggtgtcacgcaatgcaggctgctggagggatacaacacgagatcgcctgccgggagttttacccgatgttgtccgaaggtgtcattaacgaccagttcgccgccgtcgtagctttgtggatcgcttaaaaacagcgtggcagaaaggtcagtacgcatccagccgttttgtggatggctgcgtactgcgccatccacatggaaaccataggtttcattgttctgatagcgattaaacagcggcgtggaaagggtacgcggcaaggccgcggcaaagaataaagcatgttggttaaccgcgttcagcacctcattttgcagggcggcgtataacgtgctgcgggtgtcgacctgttgattgttcttaacttgcgcaccttgtgcgccggtggtgacgcgtccatccacccattcggcttgttccagttgttcgcgaaaacgagcgacgtcctgtgggcttaacacgccgggaatgtggtacatcatacaatttctccaaaaagtggggcctgcgccccacatctgaatcagaaatgcatattggctgtgagcaagaaggttcttggctcgcccgggtgataacggtagccgctcttgttgatactggcgacgtaatcggtatcaaacaggttgtaaacgtttagctggaagtcgagattgcgattaactcgataccccagtttggcatcggcgacccagtaaccttcggtaaacgctggcgttcccaccgcgccgtcactacctttatgcatactgccgatatagcgtgcgcccgcgccaacagagatatcgtcggttgcctgatattggctccataaggtgaaggcgtgctccggggtatacggcaggctactggaaccatcctgggcaacatctttgccgtttttgatggttgctttttgctgggtatagccgccaatcacctgccacgcgggagtgatattcccggccacggatatctcatagccttcgacgcgtttcttaccgtattggctgtaagttccgtcatcattttgctcaacttcattttcgatatcagtgcggaacagcgcggcggtgagcaacagacgtttatccagaacctgccatttggtgccaatctcgctggtgttggctttttgcggtttaaaatcggtgcggttggcactgttaccgctgccagactgcgcaagggcgaagttgttgccgcccggaggctgctgggaaacggcatagttaatatagacattgccgttttccgtcaggtgatacagcgccccggctttccagttcatcagattgccgctcttggcggtgtcgacggtggtgaccggagaaccttttgccacaccagttgggcaggtgatggcaccgcgtccgctgccgccgcaggcggtggcactgtcatattcagtatgataattatccagacggatcccgccgttcagctcaaaatcacgggtgatttgcagcgtatcaaaggcgtaaattgcgaaggtatccgtctgaccattggcgtttgcgccgttgcgcgtcaggccgccgggatgaatgctgctgtcaggatgataaatatttaccgcgggtaacgtcaccggattaacgccgtagttagtctgcgtttcacgggtaaattccacgccggtactgacatcatgaccgatagaaccggtatagaacgtgctggtcaggttggtctggttggtgagaattttattactcacatctttggtattcgccgtgcgactccaggtccagctattcacatcgctggtgggctgagtaatattgctcgccccgcccataatcgccgtcatcaggtaatcctgctttacgcggctccaacgggtagtattgcgaatggtggtgttatcgttgatgtcgtgctcaaaacgcatggtggcggtgtcggtggtgctatcgtcgtaatcggaatccgtgccgtaaaagttatgagtatcaacttttccggaatgattcagggccgccgttcccgcagatggggcagaatagcccggcaaaccgatggtcggaatgccgccgtctggcgtgttgtgctgggtgacatgcagataattaagatacaaacgattcgctgtaccaaggccaaaagcgacagaaggggcgacgccgtaacgctcatttttgactttgtcgcgtccggcatcgtgcgttttttcgcccattacattcaggcgcaccgcggtggtatcaccaatgacctgattgacgtccagcgtgccgcggcggaaccaggcgctgccaatactggcggaggcgtcaatgccggaatcattgcgcggctgcttgctgatcatattgatgctgcctgtcggtgcgctgcgcccgtagtcggtgccggacggccctttaatcacttcgacctgctcggtattgaaggtgtcgcggctgacgctgccgatatcgcgaatgccatcaatataaatactgttagaggtatcggcaccacgcatataaatggcgtcgccagtggtggagttaccgttctcacccgcaaaaaacgcacccacgccggggacgtttttgagcgcgtcggtaaggttggttgcgccctgatctttaatcacttgttcagaaattaccgtcatcgtgcgggtagtatccgctaccggacggctgaatttcggatcggcagattgttgtggcgcataaaggctaggcgtacttgcttcgacaaccagcgtgtcatccgcgttagtttgcccttcggcggcgagtgcctgagccacaggcgtgatgccaatacaaagaccggcaaagaacgtgaggctatgaaattgtctggcagggaaattgcgattgttttccattttgcaggtgactttttcttatatgttgaaattttcactgccacgagaaagcctctctgcggatgcgatgccactgttaatcccgtgatagtgctcgtgaaagtgataataattttgataagcattatcacttggagcgattttctatcacccattgcgcgaaaaagaaatacatttatttacattgagttcatatttgatgttttttgattacaaaacagacgaaaactgcatccagaggcgaatgcagttacgttggtggggttatttgtagatggttgcagtaccgaacatctggtcatttccgcctgcggaattaatgacataacctttcgcgccttgttcgcgcgctttttctgccagtttatcctccagatcgcttaggttacttgcgccagttgcgctaacggtaccggcgggccgtagctgaccgctgtccaggttactcatcggttgcgcggcataagccgtgagagagattccgctcaggacggtggcaatcagtagtgtgaggcactttttcataatgacatcctcataaatacaacgggtagtgcctgataagtgtaggtcgcctgcgcgatgcaaatgacgcaaaaaattgacagagatgtgcttattttttgaacgatatatttttacaaaataagacaaatcaatgacatgcataatgctgatttttatgatgaattgccataaaccatagccatgttaaggttttggggaatgataaacgcagccagatatttaccctgtcgcgttatgcgggtatcttacgccgctgcttaaaggagaatgctatgtccgcccagaaaccggggttgcatccgcgcaaccgtcatcacagccgctacgatctcgccacgctttgtcaggtcaatcctgaactcaggcaattcctcacgcttacacccgccggggagcaaagcgtagactttgccaatccgctggcggtgaaggcgctcaataaggcgttgctggcccatttttacgccgtagcgaactgggatatccccgacggttttctctgcccaccagtaccgggccgggcggattatattcatcaccttgccgatttactggcagaagcaagcggaacaattccagcgaatgccagcattctggatatcggcgttggtgcgaactgtatttatccgctgattggcgtacatgaatatggctggcgttttaccggtagtgaaaccagcagccaggcgttaagcagtgcgcaggcgattatcagttctaatccggggcttaaccgcgccattcgtctgcgtcggcaaaaagagagtggggcgatttttaacggcatcatccataaaaacgagcaatacgacgcgaccttgtgtaacccgccattccacgattccgccgctgcggcacgggcaggtagtgagcgtaaacgccgtaacctggggctgaacaaagacgatgcactgaactttggcggccagcaacaggagttgtggtgtgaaggcggtgaagtcacctttatcaaaaagatgattgaagagagcaaaggcttcgcgaagcaggtgatgtggtttacaagtctggtatctcgtggtgaaaacttaccgccgttgtatcgtgccctgacggacgtgggcgcggtgaaggtggttaaaaaagagatggcccaggggcaaaagcagagtcgctttattgcctggacctttatgaacgacgagcagcgccgccgttttgtcaatcgccagcgttaaagcgttggttcccccggcggtaacggttcagccggggtcgcgcccggagcaggcagcacctgataagtctgcactggcgcgcgaacgcccgccaggtcgaaatgttttttcacctggctgtcgagggcaaagcgtaccgtccactgtttgagtggcagcgtggtgaagctaacacgcagtgtaaacgcggtattgcttaagccgacaatcccggcaaaattcggttcaccaataatcagcccgcgaatttcttcgttttccattaattccgctaccgcatctttcagtgcctgattggctttatcagcatcttcatggcgatcaacatcataatttgccaccacgctaccaatgccgcggacaaagttagcaaaggtggttatgctagaccacggaatgatgtgatacgccccggtatcctgtcgtacgcccacggagcgaatgctcatccgttccactgtgccggtcaacggcccgatagtcaccaaatctccagtgttcatgccgttttcaaactgaataaataccccggtgataatatctttcaccagcgtttggctaccaaagctgatagccagacctaatgccccggcacctgccagcaatggcgcgatattgacgccgatttcgctcaacacaatcatgatggtgatggtactgataatcaccgccagcgcgttacgaaacagcgtaagcagggtacgcgtgcgggcgctgggtagcgggcggccatgaatatcgctagccagccggttttcgatcaaactggcgagcaccgtccagccaaccgcgctgaagaaaagaatgagtgcgatacggatcaggatatctacggttttctgccccgcgccgttttgcagccagttccagaaatcgaacaatccccatgcgctcaacagcaacattaccgccacgcagactgtcagaatacgcgccgttttcagcgccgcgctcagccagccattcaaccgtttttgcagctccggatagttacgctgagtatgtgggctgagagtgatggttttcgccagccagcgggaaaacataccggaaacaaacgctgcgataccaataatcgccaggctgcgcaccgttgcacccatcataaatttcaggctgttgcccggatcgaacaagctaaagaaaaacagcacgataaaataggcgcttgccagccagtgccacaccagcgcaaaggcgcggataaacaggctgaaaaaggccaggctatgctccgcgaagttgagcaaatgctgggtaatctcttttttattacgaaagatcaggtacaacgcccagacggtcatgcacagcataatgatgacgttcgccagcgcacctatctgtacattcacctgattagagataatcggcacggccacaatcaggccataacctatcaaactgcttaaccagctcaggcgacgactccagtaacgggcgctctcgtcctgaatcgtgaacgggcgcagctccgccacgtttgggcaaaaaatcaggcgtagtacggctttgaaaaattcaatgagggcaaaggcgttgagaaacaaactttgttggaaagcgatggtgcgactgcctgcattcaggttgtcgcttaatacctggccgacaaataatgtcagggccagtaacagcaggtcgataataaacgccccgataatcatcgccggaagctgcaaccagttactgcgctcacgatttttttgccgcgcccactgacccattttgcgatacagcggcagtgcgcacaggcgaatcagccagtaaaaaccaaacactaataccgctaacatactaaaatgggtcagcgcattgctgaaggtttgtggattaaacggcttatgcggggagccggtgatattgcgataaagttgcccgaagcgggcggaaagggcttcaccataatggcggctgacttcggtgaccttttgcagcacggtttgctcttcgaccagcgtcggcggcactatttttggtaccggttcagcagggggcgtagcggcaacggtgcgcaactggtcgatcaactctttacggctggtgtcattatccagcacatccgccagtgcgccataggccgcttttttttgttcgatatccggttccggggccggttcagtcgtactgtccgttgtcgttgtggttgtaacgccgggtatggataccgcgtgggcaggtgcgcccagcaggcagaagaggatgaacaggatccaccgcatgactcctccagtgagaaaatagagcaaaaagataagtatagatgctggaggaggggcgattttaaatgagaggaatctggtgtgcctccctttcgggtgaaagggaggaagggatattaagcaggttgctgacaacgtgcgggcttttttgccggatgcggcgtgaacgccttatccgtcctacaagttcatgcaattttaataagttgccagatatcctgtaggcctgataagcgtagcgcatcaggcaatgtgtcttattaagagacgtgctgcaaaaattcctgcaagcgctggctcggcgggttcttgatcaacacctgcggattgccatcttccgcaatccggcctttgtcgataaagatcagccggctagctactttctcggcaaaaccgatttcgtgggtcacgatcaccatcgtcatcccttcttcagccagatcctgcataaccttcagcacttcatggcgcagttccgggtcaagagcggaagtcggttcatcaaacagcatcattttcggcttcaccgccagcgcgcgggcaatcgccacacgctgctgttgaccaccagaaagttcggaagggtagtgatgtgcacgttctgccagaccgactttcgccagcagctcacgtgccagtttttccgcctcttctttgttcgcgccacgcacgcgtagcgggccaaacatgacgttttccagcgctgtcagatgcgggaagaggtaaaactgctggaacaccatacctgcttcctggcgaatcaggcgctcgtcaactttcggatcgttaaccttcaggccatcgacaatcagatcgccggaggtgatttcttccagtttgttgatgcagcgcagcagggtgcttttaccggaaccggacggcccgataatcaccacgacttcgccctgggcaatgttcaaatcgatattgtgcagcacctgggttgggccaaagtgcttggagacgtttttaaattcaatcacaggattttcatccttctttccagacgacgcagaataaagctcagcaccagggtaataatcagatagaacaccgccacggcgctccagatctcaagggcgcggaagttaccggcaataatttcttgcccctgacgggtcagttccgccacgccgatcacaataaacaggctggtgtctttaatgctgatgatccactggttacccagcggcggcagcatacgacgcagtgccagcggtaaaatgacgtagcgaatggtttcccaacgactaagaccgagcgccagtcctgcttcacgaaaacctttgtggatagacagcaccgcaccacgcgtgatttccgcaatatacgcgccggagttgatcatgatggtgaccaccgccgcagtaaatgggtcgatgcgtaagtcgttaaacgccatcggcagggcgaaataaataaacatcacctggacgacgataggtgtgccgcggatcacttcaataaagaccagcgcgacgtggttggctatccaacctccgaaggtgcgtgcaaaacctgccagcaatccgattaccagaccgcctgccagaccgaggacgctaatccacagggtcattttggcaccttcaatcagaagcggaatggcaggccagatggcactccagtcaaactgcatatgttgttcctgttaccgtggtgtaaataatcaaattcagggtaattaatggccccggagcgggtttgcgcccctcaccctaatcctctccccataggggagagggaactgccagtgcgttttacaggtgtagcgttattatttcggttcagtaccgaaccattttttgtagatttcgttgtaagttccgttctcgcgcagggttttcaacgcgccgttgactttgtcacgcagctcgtcgctacctttcgggaacgcaataccgtattgctgcgcttccagagagtcacctaccgctttgaactgaccgttaccggcggttttgatgaagtacagaatgtttggcgtatcgtgcagaacggcgtctgcgcggttggtgcccagttccatataggcgttatcgatgttcgggaactgacgcagatctttagttttgatgtttgctttcgcgtaatcaacggagccagtaccgctcttcacagcaaccactttcccgtcgagatctttcacgcttttcacatcgttattgttagctttcaccatcactaacaggccgcttttgtagtagccgtcagagaaatcgatcgcttttttacgctcgtcggtgatggtaatgcccgccagcgccagatcgacgtttttggtttgcagtgccggaatgatcccactgaaatccatcggcttcagttcgtaatccagcttcagctctttagcgatggcagcccacagatcaacgtcaaagcccacatatttatcgccctgtttaaattcaaacggaacgaaggcggtatccgtcgcgacaactaattttttatccgcggcatgagaagaaaccgcaaaagccagggtcagtgcagccagactaacttttaatacagacttcatagcatttccttttttctatccacgggacgatcccctgcgtgacattcacatatatgaaaaaatcgtgccagttttgcaactccttgatttttcgagatgcggcaaaaacgtgatgcacgatttatagggcaataccctgaagatgcaccattctggggcaccaatctggtgcgctaaaattgtgcactcaacacagtgattatttagcgtaaaacctgatgaaaaaacaatctttatgtaacgattgtgtgatgatgtggatacaaaaaatttacttaatcagctggagatagcagatggatgcactaaataagtgcgttgaggtgggctgcaaaacaaaacggcctcctgtcaggaagccgcttttatcgggtactaaagttctgcaccatcagcgatggatttattcgatgttagactcgataaaccacaggaatttatccaggtcgcgagacgcggcggtcaggatatctgcggtgtcgtcatctttcgcttcgccaatcgctttgcgtacgtcattagcgacgattgcgtaacggtcagccagttctttcaggtgatcctgaacgttgtggatgtccagcgggtaacttttcagcggggttttgctgttgataacttgagtggtccccagagctacaccgcccagctgcactgcacgttctgccatggtatccagatgatcgatcagtgcggtgcggaagccatccagcatttcatgtacggcaatgaagttagcgccgcgcatgttccagtgcgcttgtttggtaatcaaagaaagatcaataaactggataacctggcgattcagcaactctactgttgcttttttctcgctgtcggagacatcgttgcgggtataaagcagattggtcgctttacttttaactaatttagcggtactcataatttcatatcctcttgatgttatgtcccagtaattaacgagattaagtatagcaccggctatgtgttccgctattctggctgttcctatcacactaatagtggtaacaagcgtgaaaaacaaaactaataaagattcaatgagttagatatattgataagaacaattcttatttatctgctcgccaggaattttcggaataaatatgcttttgcataattcgatatataaagacggtgtagaggaaaagtagcgagaaattctgcatggttatgcataaccatgcagaaatgtaaatttaattaatgtctaattcttttattttgctctctttgcgtactgtcagcgtagaccccatactagcggcgatgatagcgccgagcgccagtagctgtatgggtgtcagtgtttctccgaggaaaatcatcccggaaacggcagccagcgccggttccatgctcatcagcgtaccaaatgtccgtgttggcaaacgggtgagggcaatcatttccaggctataaggcagagcggtgctgagaatagcgacagccagacccaatggaataacgctccagtgccagagtgcttcaccagcctgaagcgctccaattggcacgaaaattaacgctgcaatcaagctaccaattgccaccgtcgcagggccatgttccgctcctgcgcgttgcccacttaaaatgtaaatagcccaacaagccccggcccccagtgccagcgcacagccggttaaatcgacatgggaaacgtcttgccccagcggtagcaggaaccacagaccaagaaccgccagcacaacccagacgaaatctaccgggcgacgagaagagaacagcgccaccgccagtggtccggtgaactccagcgccaccgcaatacccagcggtactgtctgaatagaaagataaaaaagataattcatcccacccaggctaacgccgtaaaacaacagcggtaaccgttgctctttggcaaagcgcagtcgccatggcttaaagaacgcgatgaggatcagcgttcctaatgccagacgcagcgcagtgacacccggtgcgcccaccagaggaaaaagactcttagctaagctggctccaccctgaatagacgccatggcaacgagcaatatgactattggtaaccagaccggcattttacgtaaactaccaggcatcctttctcccacaaatatctagacttaagtaaagcgtggagtgtactggatatacccaatgctggttgagcatttgttgaaaaaattttcccccgttttgactaaaatgcgccaggattgatggaatcattagtctggtgattaggaataatctggatgaatgacagggaaaacatgcgtaatacttacgcagttctctgaaaaagtgatttaaatttagatggatagcggtgtatggaaacgttctgttacatgaaatggcccgttagacatcacaaatcgcgaagagtttcccattaatttttgatatatttaaaacttaggacttatttgaatcacatttgaggtggttatgaaaaaaattgcatgtcttagtgcactggccgcagttctggctttcaccgcaggtacttccgtagctgcgacttctactgtaactggcggttacgcacagagcgacgctcagggccaaatgaacaaaatgggcggtttcaacctgaaataccgctatgaagaagacaacagcccgctgggtgtgatcggttctttcacttacaccgagaaaagccgtactgcaagctctggtgactacaacaaaaaccagtactacggcatcactgctggtccggcttaccgcattaacgactgggcaagcatctacggtgtagtgggtgtgggttatggtaaattccagaccactgaatacccgacctacaaacacgacaccagcgactacggtttctcctacggtgcgggtctgcagttcaacccgatggaaaacgttgctctggacttctcttacgagcagagccgtattcgtagcgttgacgtaggcacctggattgccggtgttggttaccgcttctaatcactttggtgatataaaaaatccgcctctcggggcggatttttgtttttaaggtttcgggtcgaaaatatcggttccgagatggttgtaatccaccttctgtaactggaagttggtgatgtatatcggcccggctttcttctcagatataaacgggtatttgatgttaatttccttcgctttaatccccgtccactgggagaaaaagcctaagaagtcattggcactgcggcgggctttaatcacacgatgcgctttatcgtcgctggaaatgaccataaaaggcacctggaaattttgctgatatttatcatcatgggcaaggtattgcacgtctttaccgcgctctttaaaggccagaccgtggtcagaaaagtaaaccaggctgaagctgctgccgctgttgcgtaactgatcgtacagcttgcgcagtaaatcgtccgtttgcgtcatggtatagagatagcagctcgtttctttgctttgcacaaaggtttcgtattttccttgtgtcctgtcgcaggcctgcggatgactgcccatcagatgtagaacaatcagctgcggttggctgtgctcttgcgccagcacttgagcggtcatatccagtaacgcttcgtctttggtgtttttatctgcttcaaaattaccttctttcaggaagtacacttcatctgctcgtttggcgatgctggcgatagcggtatcgtattcgccgatttgaccctggttggaaaaccaccaggtctggaagcccgcgcgatttgccagggtgacaaagttatcctgaaactgtggtttgccatcgacaacgcgattgagcgttaagccaaggcttttctgcgtggagccactggcggcaatgtagtcagcaaatatcaaaccgttaacgctgctggcaaacggggtattgtcccagtgaccgccaaaggcaccgagggcatcgcgacgcgcgctttcaccgatcaccaccacataggtctgatacttcggcttaacggcagtgaccgtccaggtatctttcattccggaaagttttgccatccgttcttgctcttcaatcacctcgttattattgacgatgacatccttagcaaaacgaaataccggatagccagtatctttcagtttaaatacgccaccccaggccaggttttgcacgggagcaacaaaaaatgtcgccacactgaataccagacacaggctgtcgaaggtattccagcgcgctttttcattctctttttttcgcctgattgctattacgccgagcgcaaaaataaataagccgaccaggtagctgtaccacggaaaaatcgtcaggatttcggtgctctcttccatattggtggagtgcaatgccagcaatgtattgaaattaggcgcgccgtaggcctgagcaaaagggaaataacaagccgccaccaggctactgacaccgaccagaactttttgtacgcgaggcaatgttcgccatagcaaaagcaaaatagccgtaaacgcagcggtgtagagcaaactgaaggggtaacctaagccgaggttaattaataggctctgtaaaaagtagaacgcagtccacgggctaaatacccggctacgggtaacaaggctttctttgagggttaaattcatatgccactatcgtaacaaacgccatgtgcttaccctggcgtcaagggtcaatacctgcaagagtgcgtgaagagtggaaaggggtccgcatccgcgagccgcaatatacgcagggctgcaagaagatagagcgagccgccgtagtggtcaactactgacgaacaaatcttttgcgaaggggattgcaaatccgacaaaaagtggggtttttcagaccaaaacgcgttatgcctgcatgaaagcaggagtgaagcggcgtaccgcgacgccgctatttatcggaaggtttatcttgctgcggtttgttgttgaccatatcgcacaacatagagagcagcattaaccgtactttaaagggagaatgactaaacacgcgcatacacctcttgaactcattcataagacctcctgacttgctaatcccgtcgatccttgaggggtgattgcattacatacagatatagcacaggctatattatatagctattgctaaaacgttaattttttgtaccttcgcaactctggtttacaatgtgcgcacgaaatgagaacgctatgtatgcgtcaccataatgaggaagcacaatgagtcgtcgcgcaggtacgccaacagcaaaaaaagtgacgcagttagtgaacgtggaagagcacgttgaagggttccgccaggtcagagaggcgcatcggcgcgagcttattgatgattacgttgagctgatttctgacttgatcagggaagtgggggaagctcgtcaggtggacatggctgctcgtctgggagttagccaaccgacggtggctaaaatgcttaagcggctggcaaccatggggctgattgaaatgatcccctggcgtggcgtgtttttaacggcagaaggagagaagctggcgcaggaaagccgcgagcgacatcagatagtcgaaaatttcttgttggtgttgggcgtcagtccggaaatcgcccgtcgcgacgcggaaggcatggagcaccatgttagtgaagagacgctcgacgcttttcgtttgtttacccagaaacacggtgccaaatgagcctgccttttttacgcacgctgcaaggcgatcgtttttttcagttattaattcttgttggtatcggattaagctttttcgtgccctttgcaccgaaatcctggcctgctgctatcgactggcacaccatcatcaccttaagcggcctgatgctgctgaccaaaggtgtggagttaagcggttattttgatgtgctggggcgcaaaatggtgcgccgctttgctacggagcgtcggctggcgatgtttatggtgctggcggcggcgctgctttctacctttctgaccaacgatgtcgcgctgtttattgttgttccgctgactatcacgctaaaaagactgtgtgagatcccggttaatcggctgattatttttgaggcgctggcagtcaacgctggtagcctactgacgccaattggcaacccgcaaaatattcttatctggggacgttctggtcttagctttgccggatttattgcccaaatggcaccgctggctggcgcaatgatgctgacgctcctgctcctgtgctggtgttgtttccctggaaaggcgatgcaataccatacgggggtgcaaacaccggagtggaaaccgcggctggtgtggagttgtctggggctgtatatcgtctttctgacggcgctggagttcaaacaagagctgtggggactggtgattgtggcggcaggctttgcgctgctggcacgtcgcgtggtgctcagtgtggactggacgctgctgctggtgtttatggcgatgtttatcgacgtccatttactgacccagcttccagcgttgcaaggcgtgttgggtaacgtgagtcatctatctgaacccgggttatggttaacggcaatcggtttaagccaggtgatcagtaacgtgccgagtaccatattgttgctgaactatgtgccgccgtctttattactggtatgggcggtaaacgtaggtggctttgggttattacccggaagcctggcaaatttgattgcgctacgtatggcgaacgatcgccgcatctggtggcgtttccatctctatagtataccgatgctgttgtgggcggcgttggtgggatatgttttgttagttatactcccggccaactaaggtctggcaaataaaaaaggcggattatgagtccgccttttgctttaagttttgaagattaattcagacgaaccggcatcccggagcggtttttaatcgcttcatcaagaacaacctggtcaacatctggctgaccggtcactgtctgcacgctcttcgtcagggtaattggcacaatttcctgaccttcaaactgggcttcggtggtagacagcgggttatggacttcaatataacggctgccgtctggctcggtggtcgcttttaccggctcatcaataaactgtacgcgggtaccgaccggtactttctcgaacaggaatttgatgtcttcgttacgcagacgcacacaaccatgacttacacgcaggccgataccgaagttggcgttggtgccatggatagcatacaggcgaccgatatagagtgcatacagccccatcgggttatccggacctgccggaacgacagccggaagcggttcgcccgcagcgcggtactctgcgtgcattttggcggtcggcgtccaggtcgggcctgcttttttacgctcaactttggtggtccagttgataggcgtatctttgcctaactgaccaatgccgatcggcagcacgataacggtgttggtccctttcggatagtaataaagacgcatctcagcactgttaatgacgatgccttcatgaacggtatccggcaggatcagctgctgcggaatgttcagtacagtaccgcctttcggcaggaaggtatccacacccgggttcgcttccatcatattggaaagccccatctggtactcggcggcaaaatactccagcggctgagtgttaccttcaggaatggtgatcacctgattctgaccaaccaggcgactcccgtcggttggcagaggataagttaccgcagaggcggtactgcaaaagccgacaacagcgaaggccgctgcgaataatgttttcaatttcatattcatgttaagcgagattttgtgcctggcaggccattgggttgagaatattagagtattggaagcgcattataagttcattccagctcacagtgaaatcagatgtgtacgaaatcacattttttgcctttggcttgagtgtagaccttaagcgaggagcaggatcttctttcagacttatggcataatgcgcggtttgtcatatctcttttcaggatacgcctgtgttagtttccagtaacgtcaccatgcagttcggcagtaagccgttgtttgaaaacatttccgtcaaatttggcggcggcaaccgttacggcctgattggcgcgaacggtagtggtaaatccacctttatgaagatcctcggcggcgaccttgagccgacgctgggtaacgtttccctcgatcccaacgagcgcattggtaaactgcgtcaggatcagtttgcctttgaagagttcactgtgctggatacggtgatcatggggcataaagagttgtgggaagtgaagcaggagcgcgaccgcatctatgctttgccggaaatgagtgaagaagacggctataaagtggccgatctggaagttaaatacggcgaaatggacggttactctgcggaagctcgcgccggtgaactgttgcttggcgtgggaattccagtggaacagcactacggcccgatgagtgaagttgctcctggctggaagctgcgtgtgcttctggcgcaggcgctgtttgctgatccggatattctcctgctcgacgaaccgaccaacaacctcgacatcgacaccattcgctggctggaacaggtgctgaacgagcgtgacagcaccatgatcatcatcagccacgaccgtcacttccttaacatggtctgtacccacatggcggatctggattacggcgagctgcgcgtttatccgggtaactacgatgagtacatgacggcggcgacccaggcgcgtgaacgtctgctggccgataacgccaagaagaaagcgcagattgctgagttgcaatctttcgttagccgctttagcgccaacgccagcaaatctcgccaggcaactagccgcgcgcgccagattgataaaatcaaactggaagaggtgaaagcctccagccgtcagaacccgttcatccgttttgaacaggataagaaactgttccgtaacgcgctggaagtggaaggtctgaccaaagggtttgataacggtccgctgtttaaaaatctcaacctgctgctggaagtgggtgaaaaactggcggtactgggtaccaacggcgtcggtaaaagtacgctgctgaaaacgctggtgggcgatctgcaaccggacagcggcaccgtaaaatggtctgagaacgcgcgcattggttactatgctcaggaccacgaatatgagtttgaaaatgatctgaccgtgttcgaatggatgagccagtggaagcaggaaggcgatgacgagcaggcggtacgcagtattctcggtcgtttgctgttcagccaggacgacatcaaaaagccagctaaagtgctttccggtggggaaaaagggcggatgctgtttggtaagttaatgatgcagaagccgaacattctgatcatggacgaaccgaccaaccacctggatatggaatccattgagagcctgaacatggcactggaactgtatcagggcacgctgatctttgttagtcacgaccgtgagttcgtaagctccctggcgacccgcattctggaaatcaccccggaacgcgtgatcgactttagcggtaattacgaagattacctgcgtagtaaagggatcgagtaagtgattatccgtcaccccgatactgtcggggtgacggcggctgatgacaaatgcaaaatagcctgatgcgctacgcttatcaggcctacgcagtacctgcaatatattgaatctgcaggactttgtaggccggataaggcgttaacgccgcatcaggcattaacaaagcgcatttgtcagcaatctgagtaacgtcgaatcgattttcttaatcccacatcaattcacttccattaattctcaaacatccatgcccaacgctcgcttaccgtgaatgttgaggtcggcaagcgtaaagcgtccttcccagtttgtttcatagtcctcgcgcgggaagtcgcccgggcttgcgcctttttccagtgcggccttcaccttgtgcgcgtaggcaagatttttctcgcacatcggtgccgcaggaatgtacatcacgttgccccaaccttgttgattttcaacgggggcaacggaatggatgacgtcgcagtgccaccagacggagtctccggcttcgagttttggaatgctggttaacgcctcaatcaacagtggatgccattgctcacttaccggcaatactcttccgggcgctacgccgcacagttcatcctccggcacatcatcaagcagcggacgtaacagtacgtacgccatagcttcaggaatgggcacgacgtgcagcagcccctgaccaggcagcatatcagagagcgctgtccagccctggaatgtccgaaacacggaacatttggtggtgttgtccaccgtgtactcttcaacttccgtacgatgtgccgcatgccagggatcatattgcgccagattgccattaaagacgttggcgaaaacgcgctgatacgctggaagcagccagcgttccagtgccccggagtcggtatgcgctccaagacctttggaggtcgttccgggcggacggcggcggatacggtcagggtagatgacgctcacatccgggttaaaccattgctttccatcactttcaaatgtccacagacgattgagaaagctctgcgcattcgccatttcttcactctggcgggcctgcatttgcgcctggctccagtagatggggtaaatctcgggacgactagcgctgagcgtcccgaagaaattatcgccggggcctttgtagacctcgtcaaagcggttgcggtccagatagtccagcatgctctgatcccagcctagcgcttgttcgcgggggaaatggccttttatcaccgcacaaccgcgacgtttaatctgttcgcgctgctctgcagtaacatgacctgctttgatatcggcataagacagcaccggccagacggcatcgccctgtgctttgagtgcgttgatttcagccactcgcgtggcaatgtcatcgcttagctgattaaagatctgctggacgtcgccaagctgcgcccgcagcgcgtgcttcatctgacggatagctgctttgtgatcggcaggcaatgtgtcgctggtaaaagtagaagccataaccacctctcattaactttcattcgaaaccattctgatttgcatgtgacaatataagttataaataagttaatgcaagtttaatgatttgatgtgatgtacaggatgtaaaaagaagggaaaaccggagcgcacggctccggtagagaggtcagctgttaaaaggggatgtgttatccagcaccgcctgaatcacattcagcgcgccttcatgattattatcatcggtagcgtaacgggcgatttgtttaatgttttccgcagcattgcccatcgcaaaggaataacgcgccattttcagcatctccgcatcgttaccgctgtcgccaatcgctaccacattttgcggactcagatcccagcgtttcagtaaccggctaataccgtttgctttatgtagaccgggaataatcaggtcgataaagccaaaaccactggtaacgggtttcataatgccatcgagcgctacgtgcagtttgtcgatcactaacgggatttgttcatccggcaggttgaggctaaacttgaacagtacgtcgtcaatctcctgataatcttttacaggtttcaggcgatggtagtgttttgccatcagtgcgacaaatgcttcgggggcattttcgctgacatatgcactttgcagaccgcaggcgacaaaattgagttgcttatcttttagcaactcgccaataacaatccggctttcatgtcgggtcagttcgccgtggaacaactgcttgccatgttcgtaaaccagtgcgccgttttccgcgacaaaagagatctcatcctttagctcaggaaagaaactaataagctggtaatactgattaccgctggcaacaacgaacttaatgccgcgctttttcagttcctgatattgcgccataaaacgtggttggttgtacgttttggcgtcgttaagaaaagtaccgtccatgtctgtgacgataacttttacgctcataggtgtgctcctggctcgaaaatgaaaccgtaacagtgtaataacaatgtgacgcagagcacaaattatatttcgaatgaaagtaaggatgaaattgatgatgtgaatgatttagcccggcgacgacgccgccgggccgaggagattacagcatatgttcagtacgggcgatgatatcgtcctgagcgtctggagagagcgcggtgaagaacgcggaatagcccgcgacacgcactaccagatcgcgatactgatcgggatgttttttcgcatccagcagcgtttcgcgggaaacgatgttgtactgaatatgccagcctttatgcacttcaaagaaggtacgcagcaggatcatcagtttctgcttgtcagattcgttctccagcgttgccggattcagtttctggttgagcaacacgccgccgagaatcgctgccgtaggcagtttacccacactgccaatgaccgcagtagggccaagatggtcagtaccggaggccgggcttgcgccttctgccagcggggtgtgggctttacgcccgtccggtgttgccatagtctgcgcgccaaacggtacgttagcggagatactactcgtacccgcgtaatagttgccgccaaccggaccacgaccgtagcgcggattatggtactgtttcagttcgtcgatataggtctgataagcgcgagccagcagcgtatcgacagtatcatcgtcgttgccgtacttcggcgcaccgttaatcagccgctgacgcagctgctcgtgagtcaggccgtcgaagtcatctgccagtgcggcagcaagctgttgctgaccaatcgcaccttgttcaaacaccagtttcttcactgccgccaggctgttgccgaggttggcaatgccgacctgcaggccagaaacccagtcatatttcgcgccgccttgcttgatacttttcgctcgctcaatacagtcatccaccagcgcgctgcagagaatatcgtgcacgttctcttccagcatggtgtcgacgacatattcgatttcgatacttttgcgggtgtagtaacggatttgcgtatcccacgcgtccatcacttcatcgaagttgttgaagttacctgcgctcaacgctttttcttgtggcaggaacactttgccgctggtggcatcatgcccgccttccagcgccgccagcatcacgcgggcgaagttgataaagctcatgccggtacagcgatagccccatttgccaccgacggcggtttctatacaaccaatcgctgcgtagtcataagcgtcctgcggttcaataccgagtttaataaattccgggatcacgatttcgtcgttgttgaacgccggcatcccgaagccgcaacggatcacctgtacgcaggcgtcgaggaaatcgttgctcattcctgcatggtaacgcacgctgaggttaggctgagtggaacgcaggcgaccgcaggattcgaggatcgcgtaagagagtggattcaccgcgtccattggttgaccatcaaccagattttgcccgccaatagtgacgttctgatacagcggacttcccgcagaggctttactgtgactgccggagcggatcttgttcacttccagcagtttcagccagcagctatgcagcatctcgatggcgtgttcgcgatccagcgtctggttgagttcaacgtcgcggcgatagtacgggtagagatactggtccatacgaccaaagcttacactgtgaccgttagattcgatctgcaaaatcaactggatgaagtaacacagttgcagcgcctgccagaaagtctgcggcggctggtgggcgataagatcgcagttttctgccatcgccagcagttcatcgcgacggctttcgcgggtttcggtcgcggccatttcacgcgccagggcagcgaaacgttcaatgtgttcactgactgccaccagcacgatatcaatcgctttcaggaattgctcaccgtgtaaatcttccagcaccgtcaggttgatgcggctgcgacgttccgctacttcctcgcgcagaccatcaagccctttttccagcagcagcgggaaattcaccgccaggtgcgcatcgccggaggtcatattgccttccgctttaatgattccggtcgccagcagacctttttgctcatcggtaaacatgccgtagcagcgatcctgtacggtctgaccgcgccaccacgggcacacttcatgcagaacgcgtttgttctcttcgctcaccgcaaagccagcaccgggacgatctgccagatcatcaatctctttttcgatccagctgacagtatattccgggaagatcggcgcggcgcgaacttcgcttgcctggttgccaatgatcaactcatcgtgtttgatccagatggtgcgattcgccaggtgatgcgccagtgccagcgcgcgacgtaccgggatcggcttatcgagatgttgttgatacatctcggtatagtgctgcgcgcgctcggtacagactggcggtttcacaatatgcaccagcgcatttttgtgcgctttaatgcggtcgctgagcgtgtccagtttcagtgtggtcatggttgttatcctcgtaaggtcgcggttaaccctttctggcaggcatactgctgggcaaagtcgagcagttctggcgcatcaagcggtttttccggggcgtcatagggcagattaagtaagtgatatttgttgatgcccagcgtgtggtagggcagaaaatgaatttcgccaacgtgcagctcgtcggcggcaaaatcggtaatggcttttacagaggtttcgtcggcattaaagccctgaatcagcggcacgcggataatgatttttttgcccgctgcggcgagttttttcaggttatccagcactctggcggcgttaccgtcggtccactgtttaaacggcgcgtcggcaacgtgttttaaatcggcaagaaacagatcgatatagggcagagaaggggcgatatatttccacggcacatgcagacaggtttctaccgcagtatgaatgcctgcctcgtggctggcttgcagtagcgccatcgccatttccggctgcataaagggctcaccaccgctaagcgttaaaccgccgccgctgcgatcgtaaaacggtttatcgcgcagaacggtcgtcatgatctcctcaacgcttttcacttcaccacacacggttaatgcctgtgtcggacagcagtcggttaacgccgtcagatgctccggggttaacttttcccgatgaataagcaaaccattcagcgcgcgctcaatcacttccggcgcggccttagcgcacagctcgcagccttccagacacagtcgtgcgtcatacagcagatcctgcgtgcgggcgcggctttccgggttctgacaccagcggcagcccaggctacagcctttaagaaatacgaccgtgcggataccggggccatcatgggtgctgtagcgctgaatattgaaaatcatagttgcctctctatttcgttcaagcattaaaatactttcgaatgaaagttagattgatgtgcgtcaactgttcagagagttttcccgtgatagtctacattcagacaaaaagtacattttgaggatggttatggaactgtatctggatactagtgacgttgttgcggtgaaggcgctgagtcgtatttttccgctggcgggtgtgaccactaacccaagcattatcgccgcgggtaaaaaaccgctggatgttgtgcttccgcaacttcatgaagcgatgggcggtcaggggcgtctgtttgcccaggtaatggctaccactgccgaagggatggttaatgacgcgcttaagctgcgttctattattgcggatatcgtggtgaaagttccggtgaccgccgaggggctggcagctattaagatgttaaaagcggaagggattccgacgctgggaaccgcggtatatggcgcagcacaagggctgctgagcgcgctggcaggtgcggaatatgttgcgccttacgttaatcgtattgatgctcagggcggtagcggcattcagactgtgaccgacttacaccagttattgaaaatgcatgcgccgcaggcgaaagtgctggcagcgagtttcaaaaccccgcgtcaggcgctggactgcttactggcaggatgtgaaagtattactctgccactggatgtggcacaacagatgattagctatccggcggttgatgccgctgtggcgaagtttgagcaggactggcagggagcgtttggcagaacgagcatttaaccggacgttctgcatcctcataaattgctgatgacgtggcggagtgccgcgtcttatcaggcctggaggtggcaattactgcccacacacctcacaccccggattacgcatcagtttcatttcgcgaaactgacaggtcatcgcatcgtacatgacgattttcccgctggccggtttgccataacctgccagcattttgatcgcttccattgcctgcaagctaccaattacgccgatcaacggtgccattacgcctgcttccacgcaggttaatgcattttcaccaaacaaacggctaaggcagcgatagcacggttcaccgtcctgataagtaaagacggtgatttgaccttccatacgaattgccgcgccggaaaccagcggtaccttcgcggcaaaacagcctgcgttcagttgattacgtaccgcaacgttatccgtacagtcgagcaccagatcgtgttcagcaatcaatgctgcaagttctgcgtcatccagcagtgcattgactggcgtaatcgcgatatgtgggttgatccgcgtcagggcgtcacgggcggattccaccttcggttgcccgaccgtggcatcactgtgcagtgtctggcgttgcagattgctgaggctaaccgtgtcgaagtcgagcagcgtcaggttaccgacaccggcgcttgccagatactggctggctgcacagccgaggccgcccaggcccactatcagcacgcgagaatctttcagcgcctcctggccgtcaaaatcaaagccgcgcagaatgatttgccggttgtagcgcagcatctcctgatcgctgagttccgccattacaggcctccgaacaacgcgttaaacggttctacttccacccattcgcccacttccacattgccgcgatcgcgttccagcacgataaagcagttgccgaggctaaaggagctaaatatatgactaccctgatgtccggtggtcgtcacttccagttcgccatcggcgttgcgttgcagcacgccgcgctggaaatcaagacgtcctggcgtttttttcaggcgggacgctgtgcgtacgcgctggcgcgcgggcaggccgctggcggtgttaccgcttagttttgccagcaaaggctgtaccagttgatagaaggtcagcgtcgcactaaccgggttgcccggcaggccgcagaaccagctattgctgagtttaccgaacgcgaacggtttacctggtttaatcgccagcttccagaaggcgatctcccccagctcttcaagaatcgttttggtgtaatccgcctcacccacactaacaccgccggaactgatcaccacatccgcctggctgtcggcttcaataaatgcggcgcgcagggcatggggatcgtcgcggataatccctaagttaattacctcgcatcccaactgttctaacatcaggtgtacggcgagacggttggtatcgtagatttggccgtcgcccagcggctgaccgggcaactggagttcatcaccggtagaaaaaagcgctacacgcactttacgaatcaccggaacttcggcaatccccagactagcaattactggcagctctgcggtagtcaggcgagttcccgccgggaaaacaaccgcacctgcagagatatcttcaccgcgacggcgaatattttgcccgctacgcacttcagcagtaaaacgcacgccattgtccatttgttcagtctgctcctgcatcaccaccgcttcgcagccttccggcaccggcgcaccggtcataatacgaatgcaggtacccgcaggccattcaccatggtatggctgaccggcaaaggatttaccggcaacgggcagcggttgcccggaggcaatatcggctaaacgcaccgcgtagccgtccattgcggagttatcaaaccccggaacatcaagcgggctaacgacatcgctcgccagaatacgaccaaaacactgtaccagtggcagcgtttcctgggcggtcagtggggtgacgcgagaaagcatctcattaagcgcggtgtcgaggctcatcaatccggtggtaaattccatgaaaacactcctgcggaggcaaaatcgaatttgcctattatgtcagaaaaacgccacagactgtatgccacctcgggcgtagcgctgggtcctgcctttacatgccatatccatctttctatattcaaaaattgaatgagtaattcataaaaattctgatatttatagcaaaagtggcgaaccacccttaatggacgaatactatgggcaaagcagtcattgcaattcatggtggcgcaggtgcaattagccgcgcgcagatgagtctgcaacaggaattacgctacatcgaggcgttgtctgccattgttgaaaccgggcagaaaatgctggaagcgggcgaaagtgcgctggatgtggtgacggaagcggtgcgtctgctggaagagtgtccactgtttaacgccggaattggcgctgtctttacgcgtgatgaaacccatgaactggacgcctgtgtgatggatggtaacaccctgaaagccggtgcggtggcgggcgttagtcatctgcgtaatccggttcttgccgcccggctggtgatggagcaaagcccgcatgtgatgatgattggcgaaggggcagaaaattttgcgtttgctcgtggcatggagcgcgtcagcccggagattttctccacgtctttgcgttatgaacaactactggcagcgcgcaaggaaggggcaaccgtcctcgaccatagcggtgcgccactggatgaaaaacagaaaatgggcaccgtgggggccgtggcgttggatttagacggcaatttggcggcagccacgtccacaggcggaatgaccaataaattacccggacgagttggcgatagtcccttagtgggtgccggatgctacgccaataacgccagtgtggcggtttcttgtaccggcacgggcgaagtcttcatccgcgcgctggcggcatatgacatcgccgcgttaatggattacggcggattaagtctcgcggaagcctgcgagcgggtagtaatggaaaaactccctgcgcttggcggtagcggtggcttaatcgctatcgaccatgaagggaatgtcgcgctaccgtttaacaccgaaggaatgtatcgcgcctggggctacgcaggcgatacgccaaccaccggtatctaccgtgaaaaaggggacaccgttgccacacagtgatgaacttgatgccggtaatgtgctggcggttgaaaatctgaatattgcctttatgcaggaccagcagaaaatagctgcggtccgcaatctctcttttagtctgcaacgcggtgagacgctggcaattgttggcgaatccggctccggtaagagtgtgactgcgttggcattgatgcgcctgttggaacaggcgggcggtttagtacagtgcgataaaatgctgttgcagcggcgcagtcgcgaagtgattgaacttagcgagcagaacgctgcacaaatgcgccatgttcgcggtgcggatatggcgatgatatttcaggagccgatgacaagcctgaacccggtatttactgtgggtgaacagattgccgaaagtattcgtctgcatcagaacgccagtcgtgaagaagcgatggtcgaggcgaagcggatgctggatcaggtacgcattcctgaggcacaaaccattcttagtcgttatccgcatcaactctctggcgggatgcgccagcgagtgatgattgcgatggcgctgagttgccgcccggcggtgctgattgccgatgagccaaccaccgcgctggatgtcactattcaggcgcagatcctgcaattaatcaaagtattgcaaaaagagatgagcatgggcgttatctttatcactcacgatatgggcgtggtggcagagattgccgatcgggtactggtgatgtatcagggcgaggcggtggaaacgggtaccgtcgaacagatttttcatgcaccgcaacatccttacacccgtgcgctgttagctgctgttccgcaacttggtgcgatgaaagggttagattatccccgacgtttcccgttgataagccttgaacatccagcgaaacaggccccccccatcgagcagaaaacggtggtggatggcgaacctgttttacgagtgcgtaatcttgtcacccgtttccctttgcgcagcggtttgttgaatcgcgtaacgcgggaagtgcatgccgttgagaaagtcagttttgatctctggcctggcgaaacgctaagcctggtgggcgagtctggcagcggtaaatccactaccgggcgggcgttgctgcgcctggtcgaaagccagggcggcgaaattatctttaacggtcagcgaatcgataccttgagtcccggcaaacttcaggcattacgccgggatattcagtttatttttcaggacccttacgctagcctggacccacgtcagaccatcggtgatagcattatcgaaccgctgcgtgtacacggtttattgccaggtaaagacgcggctgcacgcgttgcgtggttgctggagcgcgtgggcctgttacctgaacatgcctggcgttacccgcatgagttttccggcggtcagcgccagcgcatctgcattgctcgcgcgttggcattgaatccaaaagtgatcattgccgacgaagccgttagcgcgctggatgtttctattcgcgggcagattatcaacttgttgctcgatctccagcgtgatttcggcattgcgtatctgtttatctcccacgatatggcggtggtagagcggattagtcatcgtgtggcggtgatgtatctcgggcaaattgttgaaattggtccacggcgcgcggtcttcgaaaacccgcagcatccttatacgcgtaaattactggcggcagttccggtcgctgaaccgtcccgacaacgaccgcagcgtgtactgctgagcgacgatcttcccagcaatattcatctgcgtggcgaagaggtggcagccgtcagcttgcaatgcgtcgggccggggcattacgtcgcacaaccacaaagtgaatacgcattcatgcgtagataacattcaggcggagaataaaatggcaagagctgtacaccgtagtgggttagtggcgctgggcattgcgacagcgttgatggcatcttgtgcattcgctgccaaagatgtggtggtggcggtaggaagcaatttcaccacgctcgatccgtatgacgcaaatgacacgttatctcaggccgtagcgaaaagcttttaccaggggctgttcggtctggataaagagatgaaactgaaaaacgtgctggcggagagttataccgtttccgatgacggcattacttacaccgtgaaattgcgggaaggcattaaattccaggatggcaccgatttcaacgccgcggcggtgaaagcgaatctggaccgggccagcgatccggcgaatcatcttaaacgctataacctgtataagaatattgctaaaacggaagcgatcgatccgacaacggtaaagattaccctcaaacagccgttcagtgcgtttattaatattcttgcccatccggcgaccgcgatgattagtccggcagcgctggaaaaatatggcaaggagattggtttttatccggtgggaaccggaccgtatgaactggatacctggaatcagaccgattttgtgaaggtgaaaaaattcgcgggttactggcagccaggattgcccaaactggacagcataacctggcgtccggtggcggataacaacacccgcgcggcaatgctgcaaaccggtgaagcgcagtttgctttccccattccttacgagcaggccacactgctggagaaaaacaaaaatatcgagttgatggccagtccgagtattatgcagcgttatatcagtatgaacgtgacgcaaaagccgttcgataacccgaaggtccgtgaggcgctgaattacgccattaaccgtccggcgctggtgaaagttgcctttgcgggctatgcaacgccagctactggtgtggtaccgccaagtatcgcctacgcgcaaagttataaaccgtggccttacgatccagtgaaagcgcgcgaattactgaaagaggcgggatatcccaacggtttcagtaccacgctgtggagcagtcataaccacagcaccgcgcagaaagtgctgcaatttacccagcagcagttagcgcaggtcgggattaaagcccaggtgactgcgatggatgccggacagcgggcggcagaagttgaaggtaaagggcaaaaagagagcggcgtgcggatgttctacactggctggagcgctagtaccggcgaagcggactgggcactaagcccgctgtttgccagccagaactggccaccgacgctgtttaataccgcgttttacagcaataaacaggtggatgacttcctggctcaggcactgaaaactaatgatccggcggaaaagacccgcttatataaggcggcgcaggatatcatctggcaagaaagcccgtggatcccgctggtggtagaaaaactggtgagcgcacacagtaaaaacctgaccggtttttggatcatgccagacaccggcttcagctttgaagacgcggatttgcaataagcaacgcagggagtggaatgcttaattacgttatcaaacgcttactggggttgattccgacgctgtttatcgtcagcgtgctggtgtttttatttgtccatatgctgcccggcgatccggcgcgattgattgccgggcccgaagctgatgcgcaggttatagaactggtgcgtcagcagctggggttggatcagccgctgtatcaccagttctggcactatatcagcaatgctgtgcagggggattttggcctgagcatggtgagccgtcgtccggttgccgatgagattgccagccgctttatgccaacgctgtggctgaccataaccagtatggtctgggcggttatatttggtatggcggcgggaattatcgccgccgtctggcgtaaccgttggccggatcgattgagtatgaccattgcggtgagcgggatcagctttccggcatttgctctggggatgcttttaattcaggtattctccgttgaactgggctggctgcctaccgtgggagcagacagttggcagcactacattttaccctccctgacgctcggcgcggcagtggccgccgtgatggcgcgctttacccgcgcgagctttgtcgatgttttaagcgaagattatatgcgtaccgcgagggcgaaaggggtgagcgaaacctgggttgtcctcaaacacgggctacgtaacgcgatgatcccggtagtgaccatgatgggcttacagtttggctttttgctcggtggttccatcgttgtggagaaagttttcaactggccgggacttggacgcttactcgttgactccgtagaaatgcgtgattacccggtgattcaggcggaaattctgcttttcagcctggaatttattcttatcaacttagtggtggatgtgctttacgccgccattaacccggctatcaggtacaagtaaggatgcgactatttaactggcgacgtcaggcggtgttaaacgccatgccactggtcaaacctgaccaggtacgtacaccgtggcatgaattctggcgacgatttcgccgtcagcatatggcgatgaccgccgcattattcgttattttattgattgtggtggccatttttgcacgctggatcgctccctatgacgccgaaaattattttgattatgacaatctgaataacggaccttctttgcagcactggtttggcgtcgatagtctggggcgtgacattttcagccgtgtcctggttggtgcgcaaatcagcctggcggcgggcgtgtttgccgtgtttatcggtgcggcgatcgggacgttgctgggcttgctcgctggatattatgaaggctggtgggatcggctgatcatgcgcatttgcgatgtgctgtttgccttcccgggtattttactggcgatcgctgttgttgcggtgttgggaagcggcattgctaacgtgattattgcagtcgccattttttccatccccgcgtttgcccgcctggtgcgcggcaacacgctggtgttgaaacagcaaacctttattgagagtgcacgcagtattggtgccagcgatatgaccgttttgttgcgtcatatcctgcctgggaccgtctcttctatcgtggtgtttttcaccatgcgcattggtaccagcattatctctgccgccagcctcagttttctcggcctcggtgcgcagccgccgacaccagagtggggagcaatgctcaatgaggctcgagcggatatggttatcgcgccgcatgtcgctgtttttccggccctggctatttttctgaccgtactggcgttcaatttgttgggcgatggtttacgcgatgcgctggatccgaaaattaaaggataattacgtttgaatattgcttgaaagggtaatcacctcacaggaaattattgccctaagcaagtgttgtaactttctgctgattttgtagaatcgggtaatttggttaaaaagccgcagcaagggacaatttttgcagcggcacagcgttcagatagttattttgttaaatgtattaacatgctgagtttatacgaaaagataaagataaggctgataattttatttttattggcagcactgagttttattggtctttttttcatcattaactatcaactggtaagcgagcgcgcggtaaaacgtgccgatagccgctttgaacttattcagaaaaacgttggctatttctttaaagatattgaacgtagcgccctgacattaaaggacagtctgtatttattaaaaaatacagaggagattcaacgcgccgtgattcttaaaatggaaatgatgccatttttagacagcgtgggactggtacttgatgataataaatattatctttttagccggagggcgaatgataaaatcgttgtttatcatcaggaacaagtaaatggaccgcttgtcgacgagagtgggcgggttatttttgccgattttaacccaagcaaacgaccgtggagcgtggctagtgatgactctaacaacagctggaatccggcatacaattgctttgatcgtccgggtaaaaaatgtatctcttttacgctacacatcaacggcaaagatcacgatttgttagcggtggataaaattcatgtcgatttaaactggcgatatctgaacgagtatcttgatcaaatcagcgctaatgatgaagttctatttttgaaacaaggccatgagatcattgccaagaatcaactcgctcgtgaaaaactgattatttataatagcgaaggtaattataatattattgattctgtcgatactgaatatatcgaaaaaacaagtgcggtgccaaacaacgcattattcgaaatctatttttattatcctggcggtaatttattgaacgcaagtgataaacttttttatctgccgtttgcgttcattattatcgtattgctggtggtttatttaatgaccactcgtgtgttccgtcggcaattttctgaaatgacagagctggttaatacgctggcgtttttgcctgacagtacggatcaaatcgaggctctgaaaattcgtgaaggcgatgcgaaagagattatcagcatcaaaaatagcatcgcggaaatgaaagatgccgaaattgaacggagtaataaattgctcagtctgatctcttacgatcaggaaagtggttttattaaaaatatggcgattattgagtctaacaataatcagtatctggctgtggggatcatcaaactgtgtggtctggaagccgtggaagcggtgtttggtgttgatgagcgcaataaaatcgtcaggaaattgtgtcagcgaattgccgagaaatatgcgcaatgctgcgatatcgtgacattcaatgccgatctctatttacttctgtgtcgggaaaatgtacagacatttacccgtaaaatagcgatggtaaacgattttgacagcagctttggctaccgcaatctgcgcatccataagtctgccatttgtgaacctttgcagggggaaaacgcctggagttacgcagaaaaactgaaactggcgatttccagtatccgtgaccatatgttcagtgagtttattttctgtgatgacgcgaaactcaacgaaatagaagagaatatctggattgcgcgtaatattcgccatgcaatggaaattggcgaactattcctcgtctatcaaccgatcgttgatattaacacccgcgccattctgggcgcggaggcgttgtgccgttgggtgtctgcggagcgggggatcattagtccgctgaagttcattaccattgctgaagatatcgggtttatcaatgagctgggttatcagattattaaaacggcaatgggtgaattcagacattttagtcagcgtgcgagcctgaaggatgatttcttactgcatattaatgttagcccctggcagttaaacgaaccacactttcatgagcgttttaccaccatcatgaaagaaaatggcctgaaggcgaacagcctctgtgttgagatcactgaaaccgtgatcgagcgaattaatgaacatttttatctcaatattgaacaactgcgtaaacaaggggtacggataagcattgatgactttggcaccggtttgagtaacctgaaacgtttttatgaaattaatccagacagcataaaggtggacagccaattcaccggcgatattttcggtactgcgggaaaaattgtgcgcattattttcgacctggcacgctataaccggatcccggtgattgcggaaggcgtagagagcgaagacgttgcgcgcgaattaatcaaattaggatgtgttcaggctcaggggtatctgtaccagaaacccatgccattctccgcctgggataaaagtggaaaattagtaaaagagtaatttacgtatgtccagaatcaataagttcgtacttacagtcagtctgctgatttttatcatgattagtgcagttgcctgcgggatctacactcaaatggtaaaggaacgggtgtatagcctgaaacagtccgttattgatactgcttttgcggtggcaaatattgctgaatatcggcgtagcgtggcaattgatcttatcaacacgctaaatcccacggaggaacagctgttggttggtttgcgcacagcttacgccgacagcgtttccccctcttatttgtacgatgtcggtccttatctgatttccagtgacgaatgtattcaggtaaaggagttcgagaaaaattattgtgcagatattatgcaggttgtgaagtatcgacatgtcaaaaatacagggtttatctcttttgacggtaaaaccttcgtctattacctctatccggtaactcacaatcgtagtctgatatttttgcttggtctggagcgtttttctttactgagtaaaagcctggcgatggacagcgagaacctgatgttctctctatttaagaacggtaaaccggtgaccggtgatgaatataatgctaaaaacgccatcttcaccgttagcgaagcgatggagcacttcgcctatttgccgaccggattgtatgtatttgcgtataaaaaagatgtttatttgcgggtttgtacattgattattttctttgccgcattggtggcagtgataagcggtgccagttgcctctatctggtacgcagagtgattaatcgtggtattgtggagaaagaagccatcattaataaccattttgaacgcgtactggatggcgggcttttctttagcgctgccgatgtcaaaaaactctacagtatgtataacagcgcgttcctggacgacctgaccaaagcaatgggcagaaaatcctttgacgaagatttaaaagcgctgccggaaaaaggcggttatttgtgcctgtttgacgtcgataaattcaaaaacattaacgacaccttcggtcatttgctgggcgatgaagtgttgatgaaagtggtgaaaatccttaaaagtcagatcccggtagataaaggtaaagtctaccgcttcggcggtgacgaatttgcggtgatttatacgggtggaacgctggaagagttgctaagcattctaaaagaaatcgttcatttccaggtgggaagcattaatttaagtaccagtatcggtgtagcacatagtaatgaatgtcctaccgtcgaacgcttgaaaatgctggcggatgagcggctgtataagagtaagaaaaacggcagggcacagattagctggcagtaatcattattcgcaggccggacaaatgattttgcccggcctgaattaattaaacccggctaccccacaaatcgtactcatcggcgtgctcgactttcacacgcaggatatcacccggcttaacgttggtttcaccattgagataaaccgcgccgtcgatttccggtgcatctgccatgctgcgaccaatcgcgccttcttcgtccacttcgtcgataatcaccagaatttcacggcccactttctcttgcaggcgctcggcggaaatctgctgctgcagctgcatgaaacggttccagcgttcttctttaacttcttccggaacctggtcaggcagggcattggcgtctgcaccttcaaccgggctgtatttaaagcagccaacgcgatccagacgcgcttctttcaggaagtcgagtagcatctggaaatcttcttctgtctcgccagggaagccgacaataaaggtactgcgtagggtcagttccgggcagatttcgcgccactgtttgatgcgcgccagttggcgatctacagaacccggacgcttcatcagtttgagaatgcgcgggctggcgtgctgcaacggaatgtccagatacggcaggattttgccttctgccatcagtgggatgacgtcgtccacatgcggataagggtaaacgtagtgcagacgtgtccagatccccagtttgcttaactgttcgcacaggctgaccatgctggtttttaccggctcgccgttgtggaagccagtacgatgtttaacatcaacgccataggcggaagtatcctggctgatcaccagaatctctttaacgcccgcatctaccagacgtttcgcttcacttaacacttcgccaatcggacggctcaccaggtcgccgcgcatagacggaataatgcagaaggtgcagcggtgattacagccttcagaaattttcagataggcataatgacgcggcgtcagtttcacaccttgttctggcaccaggctcaggaatgggttgtgtttcggttttggcacgtagtgatgaacgtgctccagaacctgctcatagctatgaggcccggtgatttccagcactttcgggtggacttcgcggatctgatcttcttttgcccccagacaaccggtcacaataaccttgccgttttcattcaacgcttcaccaatggcttccagactttcttgtaccgcgctgtcaataaagccgcaggtgttgacgatcaccatgtccgcatcgtcatagctcggtaccacgtcataaccttcagtgcggagttcggtgagaatacgctcactatcaacaaggtttttcggacagccaagggaaacaaagccgattttcggctggggagttactttgctcatagcttaaaaaatattcagttacaggaaaggtcagggcagggattctacagagttctggataaaatttgtatcgcaatctcattcgctggcggaggcgaaggaaatgtaaattttgttaattcggcgtgaagaattgatcctggacagcattttgctcaaaaaatagccatactatttaattgcaacaaggctgggaagaggaggatcgaagtatgttcgttgacagacagcgaatcgatctgctgaaccggttgatcgacgcacgcgttgacctcgccgcatacgtgcaactgaggaaggcaaaaggatacatgtccgtcagcgaaagcaatcatctacgagataacttttttaaactgaatcgcgaactgcacgataaaagcctgcggttgaatcttcatctggatcaggaagagtggagtgctcttcatcatgctgaagaagcattagcgacagccgcagtatgtttgatgagtgggcaccatgattgcccgactgttattaccgtcaacgccgataagcttgaaaattgtctgatgagcttaacgctgagtatccagagcctgcagaagcacgccatgcttgagaaggcctgaaaactaagggggagaaagcgtctcccccttcatgtttaagtttttgtaaaaatgaatttgttatctcctccactgactacgctttaagccagagtcaatccggaggcgttatgcatcgacaatcctttttccttgtgccccttatttgtctttcttccgctctctgggcggctcctgcaacggtaaatgtcgaagtactgcaagacaaactcgaccatccctgggcactggcctttttacccgataatcacggtatgttaatcactctgcgcggcggcgagttgcgtcactggcaagcaggaaaaggattatctgcgccgctttccggagttccggacgtttgggcgcacgggcagggcggcctgctggacgtggttttagcgcctgattttgctcagtctcgccgcatctggttaagttattccgaagttggcgatgatggcaaagccggaactgctgtgggttatggccgcttaagtgatgatctcagtaaagtgaccgacttccgcaccgtctttcgccagatgccaaaactgtctaccggcaaccattttggcgggcggctggtattcgacggtaaaggttatctttttattgctctgggcgaaaacaatcagcgcccgacggcgcaggatctggataaattacagggcaaactggtgcgtctgaccgaccagggcgaaatcccggatgataatccttttataaaggaatccggtgcgcgcgccgagatctggtcttatggcattcgtaatccgcaaggaatggcgatgaatccgtggagtaatgcactgtggctgaatgaacatggcccgcgcggtggtgatgaaattaatatcccgcaaaaaggcaaaaactacggctggccgctggcaacctggggaatcaactatagtggctttaagataccggaagcgaaaggggagatcgtcgccgggaccgagcaacctgttttttactggaaagatagccccgctgtgagcggcatggccttctataacagcgataaattcccccagtggcagcaaaaattatttattggcgcgctgaaagataaagatgtcattgtgatgagcgtcaacggcgacaaagtgacagaagatggccgtattttaacggacagagggcagcgaattcgtgatgttcgcactggacccgacggttatttatacgttctcaccgacgagtccagtggggaattacttaaagttagcccacgcaattaactaacgggaatcatcaccactttgcgcactgcggggcgttcagtgagttgctgataccagcgttgcagatttggacgcggtgtccaggtcaggccaacgttaaacaaattgtagatgaacggtgcgatagcgatatcgcccacaccaaactcgtcgccagagaaccattttacttttgccagttccgcatcgagcagggcaaacagggcgtcgcactctttgcaactggcatcaatggcggcctgatcgcgctcttccggtggtgttctgactaatcccatcaggatcccgcgatgagcattactgagcgtctggtttgcccagtccatccatttttccgcttccgcacgacgtgccggactgtcgatccacaggcgtttttgcccgtactgtgccgccagatagcggacaatggcgttactttcccaaagaatgagatcactttcgtcgtcacgcaacaacggcaccagcccgttagggttcatcgccagaaaatcagcatcgtgatttatcccaaactcacggcccgcgagaatttgctcataaggtagttccagttcttcgagcgtcagcaatactttttttacgttagtactattattccgaccccacagcgtaatcatactcaccccttttccgacaggcagccacaggctgaacaggactccgatggtgaagtaaagttaacttttaagcaacagctggcaaaaaaatgacaccagaagcagcgaagcggcaggatattgcataaactttaaaaactttaccaacttacggtttctttaagtttgtgtgtgcgttattaatcaccaaacttatcatacggcgatataacgtattttttttgaatggatactcgggtggcatttatgacgcaatactcctctctccttcgtggtcttgcagcgggttctgcatttttattcctttttgccccaacggcattcgcggcggaacaaaccgttgaagcgccgagcgtggatgcgcgtgcatggattttaatggattacgccagcggtaaagtgctggcagaaggcaatgcggatgagaaactggatcccgcgagcctgactaaaatcatgaccagctatgtggttgggcaggcgcttaaggccgataagattaaactcaccgatatggtgacggtcggtaaagatgcctgggcgacgggaaatccggcactgcgtggtagtagcgtaatgttcctcaaaccgggcgatcaggttagcgtggcagacttgaacaaaggtgtgattatccagtccggtaatgacgcctgtattgcgctggctgattacgttgccgggagccaggagagttttattggtctgatgaatggttatgccaaaaaactgggtctgaccaacactaccttccagacggtgcacggcctggatgcgccggggcagttcagcaccgcgcgcgatatggcattgctgggtaaagcattgatccacgatgtgccggaagagtacgccattcataaagagaaagagttcaccttcaacaaaattcgtcagcctaaccgtaaccgtctgctgtggagcagcaatctgaatgttgatggcatgaagacaggaaccacggcaggcgcgggatataatctggttgctagcgctacccagggcgatatgcgtttaatctccgtagtgttgggggcgaaaaccgaccgtatccgttttaatgagtctgagaaattattgacctggggtttccgcttctttgaaaccgtgacgccaattaaacctgatgccacctttgtgactcagcgcgtctggtttggtgataagagcgaagtgaatctcggggcaggtgaagcgggcagtgtgaccataccgcgtgggcagctgaaaaacctgaaagcgagttatacgttaacggaaccgcagcttaccgcaccgctgaaaaaaggtcaggttgtcgggaccattgatttccagcttaacggtaaatccattgagcagcgtccgctgatcgtgatggaaaatgtggaagagggcggattctttggtcgggtgtgggatttcgtgatgatgaaattccatcagtggttcggcagctggttctcttaatcttctgataaccggatggcgcgaaacgtcatccggttatacgtcattaatacatcaacttaatgcgctgcgtctgcgcgtacttcacatactcatcttccgggcaacaatcgctcaccacaatatcaaagcgtttcaggtcacccatgcgcgccggacgcaccttgccaaatttactgtggtcgacaaccagcacatgcttttgcgccatgctcatggcccagtgttttaccggcaactcttcaagattaaaacaggtagcgcctttactgacatgcacgcccgccgcagaataaaaagcgatatccgggcaaaaattattcagcgtttgctgaaaatcgatgggtttgaaaatggcgttgctggcgtgaaattcaccaccgcaaagaaacgcgcggcaatggggtttctctttcagcgccagaaaggtatttaggctataacaaacggcggtaaaagggatttcattatcaatcgcttcaataatccacggcgtggtggtgccacagtcaaaaaagagggtctgatcgggttctaccagcgtcgcagccagttttgccgcccggcgtttttcttccaccaggcgggatttttgatcgcttaacaggtaatggctggcactgcgcggttccagaacaatatagccgccgagcaaaacgacgggcgcactgtggttgttcagatcgcgacgaatcgtcatctcgctaaccccaagcagggcggcggcgtctttaagatgtaacttatcgctgcgttttaattcttgcagcagctgcccgatacgctcttcgcgacgtgtttccataatccctctgaatagttattgaagcgagccgctcaatactacactttttagcagagatcagtcacgcacccagcctttgcggatcggtaatgcaaaacagacgcgataccagctttgcagacgttgatagagtttatgccccatcgcttgccagataatctgggcactaaggcagccaatcatacctgccagcaatccaccgagcatatccagcggccagtggacgccaagataaacgcggctccaggcaatgacgacggccagcaccattaaaagactgccggaccacaggcgatgccagcataaaaatgccagtgcaaaggtgaaaatcaccgtaccgtgatcgcttgggaaactgtcatccgccgcatgatgcaggaagttatagccgatattttcgacaaagggtcggtcgtgcggaaaaagatgtcccatcgtccaggacacaaacaggctgaccgccagcgcgatagcgatttttatcaccagttgccgttgtgctgtaagcccccacaaccaaagtaccacggccagcaacggcaccacggtaatcaaatctttagcaataaaaatcgccaagctgatcatccacggagcgctgtctggcgtcgcgttaataagagagaatagagagagattcaaattttccagcataacttcccgacgcaaagtgattaaaagggagccaatacaggcaagtcgttgagaataaagtgcaggttaaactgggtaaagcggcatcgtcttatttccctcaagcggcctgtttacggtgggtgattgtaacgggcataggttaaataaaacttaaagaaagcgtagctatactcgtaataatgtaagaatgtgcttaaccgtggtttcagctacaaaattcgctttctcgttagctgcgcttttattaaactctgcgcgattattattggcgaagaaattgcatgcaaaataaattagcttccggtgccaggcttggacgtcaggcgttacttttccctctctgtctggtgctttacgaatttagtacctatatcggcaacgatatgattcaacccggtatgttggccgtggtggaacaatatcaggcgggcattgattgggttcctactagcatgaccgcgtatctggcgggcgggatgtttttacaatggctgctggggccgctgagcgatcgtattggtcgccgtccggtgatgctggcgggagtggtgtggtttatcgtcacctgtctggcaatattgctggcgcaaaacattgaacaattcaccctgttgcgcttcttgcagggcataagcctctgtttcattggcgctgtgggatacgccgcaattcaggaatccttcgaagaggcggtttgtatcaagatcaccgcgctgatggcgaacgtggcgctgattgctccgctacttggtccgctggtgggcgcggcgtggatccatgtgctgccctgggaggggatgtttgttttgtttgccgcattggcagcgatctcctttttcggtctgcaacgagccatgcctgaaaccgccacgcgtataggcgagaaactgagtctgaaagaactcggtcgtgactataagctggtgctgaagaacggccgctttgtggcgggggcgctggcgctgggattcgttagtctgccgttgctggcgtggatcgcccagagcccgattatcatcattaccggcgagcagttgagcagctatgaatatggcttgctgcaagtgcctattttcggggcgttaattgcgggtaacttgctgttagcgcgtctgaccagccgccgcaccgtacgtagcctgattattatgggcggctggccgattatgattggtctattggtcgctgctgcggcaacggttatcagtagccacgcgtatttatggatgactgccgggttaagtatttatgctttcggtattggtctggcgaatgcgggactggtgcgattaaccctgtttgccagcgatatgagtaaaggtacggtttctgccgcgatgggaatgctgcaaatgctgatctttaccgttggtattgaaatcagcaaacatgcctggctgaacgggggcaacggactgtttaatctcttcaaccttgtcaacggaattttgtggctgagcctgatggttatctttttaaaagataaacagatgggaaattctcacgaagggtaaaaaaatgcctgactgctttgtgcgatcaggcattctcgaattaatggtgatggtcgtcaatctggtgttcgataaccatcccttcacctacgctggcaagatggcgaacataaggatgcgggcggtaagccggagctggcgcaggagccacatagacggtttgcggcacagtcgcgacgctgaccgcttgtggaacgctgacactatcaggaaccacaaccactttgtatccactcggcacatcgacggtgacactttgcgccatcgccacaccagtaaagcccattaaaagcgcgcccaacagtagacaatttttcataatcatttcgcctgaaataatgcagcgggttaatttccgcgaattatgcagccttcattcaggcattgtgttgccgggcgtgctgccggttttattggtcaaatggcgcttcgtgtttaagaactttatcgatcacatccagtacgccttcacggttattggagcctgcgcggtattttgccgctgcgacgaccgcgctaccggcattttccattgcaaaactaaagcctgcctgacgcagcatctcaatatcgttaccgccatcgccaaagaccaccacttcgctgtcgtctattccccataatttctgcagttggcgaaggccattggctttatgtacgccggggataatcagatcgatgctgccgttgccggtgtggacgctcaccataatatcgccgatggcctcatgtaatgctttttgtacttgtggaatcagttcatcggaaagattcaggccaaacttaaagaagatatcctctaagttgtcaaagttatcgacgtattccagacggtgataatacatttccgccaccgttttcatggcatcgtcatattttttgagtgtataggcactattttttccgcaggcaataatttccacttccgggcgcgtcagcaaatgttccacgacagtagcaaacgcatccttgcttagctcgccattaaaaacatctttgccttcgctcactacccagccgccgttttcagccacaaaggcaatttcattagcaatttcagggaagaaagagatcaactgataatattgattcccgctggcgactacaaagcgaattccttgtgctttcatttgctgatactgagccataaaccgctcacggttataggttttttgatcgcttaagaaagtaccatccatgtctaccgcaattaatttaatgctcatcaactattctccatcgccgtctgcgttttggtatcgggtttggcgacggctttcgcgacaatagccgcgagaataaccagcgccagtacaaccagcattgcactacgtaatccataatgttcgccgagatagcccagcagcggcggcccgacgaggaaagccagataaccggtcgttgctaccacactgacgcgggttggtgcatcggggccggtatcgctggcggcagaaatggtcagcgggaagcccaggctggcacccagtccccagagtacaacagacaccccagcgacccaggcgctatcgacaaaaataatcagcccaatacccaacgcccccattagtgcactggcccgaaccacggcaacgcgactgtaacggtcgatgaaccaaccgccggtgaagcgtccaacggtcatccccagggtaaaaccggcataaatcaggctgccggaagtagggctaaaaccgtgaccgtcaaccattaataagggtaaccagtcgttggcagaaccttcggcaaaggccatcgccagcaccacaacacctatcagcagcaactggatatcgcgataaaaaggtacgcctttttcgccatgctgggtgccatcggcagcatttttgcccgtaccgtcagggattgcctgaatggcgatataaataggtgcgatacctaccagcgccgccaataaaatgtgcaccgttgccggaacgccaaaggccgtcagtgccatcccgacacctgcgcctgccagcgtgcccaggctataaaaaccgtgcatcatcggcaaaaccgtcttattcatttctcgctcaacggcagcaccttcaacgtttatcgccacttccgcagaaccaaaacttgccccaaagacgccgagaccaacggcaaagagcagggggcttgtcagccagagtgccagacttaatatcatcatcccgatcaatgcgcaggacatcgtgaccaggatgacattacgtgtcccaaagcgtttcactaaccacgcgctgcagagaataccgctcatgctaccgatgctcagaccaaagagaacaccgcccatttcagcgatgctgacagagagaatatcgcggatagcaggcgtacgggttgcccaggacgccattaacaggcctggcaaaaagaagaacataaacagcgcccaggttcggcgtttcaatgcattacgactagaatttacggtcatagatcacgtcaaaataagaagagggaagacaacattagcaaggttgtgtacatttgtacacaattgcagagagaggaaatgacatgcgtcgcgctaacgatccgcaacggcgagaaaaaattatccaggccacgctggaggcggtgaaactttacggaatacatgctgttacgcaccgcaaaattgctacccttgccggggtaccgttgggaagcatgacctactattttagtggaattgatgagttgttactggaggcgttcagcagttttactgagatcatgtcccggcaatatcaggcattttttagcgatgttagtgatgctccgggcgcatgccaggctatcaccgatatgatctacagcagtcaggttgcaacgccggataacatggagctgatgtaccagctctacgcgctggctagccgaaaaccgctattaaaaacggtaatgcaaaactggatgcagcgcagtcagcaaacgctcgaacaatggtttgaacccggaaccgcccgcgcgcttgatgcgtttattgaggggatgacgctgcattttgtcaccgaccgtaagccgctaagccgcgaggagattttgaggatggttgagagggttgcagggtaatagataagttttagataacaaaaaacccatcaaccttgaaccgaaatggcggggttgatgggctccacaaaatggggacatcaaagaaaagcagtggcactaattaagactgatgccctgcggaaaagttctgcggttgtgcaaaaaaatttcattttcagggcaacttcagttttatcctaatcctggccataccatgacgatgattgtccctgccagcgtcagcaggacgttggcgattgcataggtgcccgcatagcccagcgccgggatgttactgcgagctgtatcactgatgatctccattgccggcgcgcaggtacgtgcgcccatcattgcgccgaacaacagcgcgcggttcattcgcaatacataagcaccgaacaagaaacagataaccacgggcaccagactgacaatcaatccggcaatcaacatctgaccgccaatcgcgcccaggccgttattaataccgctaccggcgctcagaccaacgcctgccataaacaccatcaagccgaactctttcaccatgcttaatgcaccctgcggaatgtaaccgaaggtcgggtggttagcacgcataaagcccagcataattccggcgaataacaacccggcagcgttccccatgccgaaactgaatgtgctgaactggaaggtgatcatcccgatcatcagcccaataacaaagaaggcgcagaatgccagcaggtcagtgacctggctgtgaatgctgataaagccgatgcgatcggcgatggtttttacgcggcgggcatcgccgctgacttgtaaaacgtcacctttgttaagcacgacgttgtcatctatcggcatctcaatctggctacgaatgacgcggttaaggaagcaaccgtgatcggtcaacttcagttgtgcgagacgtttacctacagcgttatggtttttaacgaccacttcttcagtgacgatacgcatgtcgagaaggtcacgatcgaaaacttctttaccgttacggaagctgggatcgagtcgggcatgggcgtcgggatagcctaccaacgctatttcatcgcccatttgtagcacggcatcaccgtctggatttgccagaatcccgttacgtcgaatacgttcaatgtagcagccggtttgtcgataaatacccagttcacgcagatttttgccgtcggtccaggccaccagttccgggccgacgcgataggcgcggatcaccggtaaataaaccttacggttggcatcagtgtccaggccacgttcgcgggcgatttgctgggcgctggtctgtaagtcctgatgctgcaatttcggcaagtaacgcgcaccaacaatcaaactcaccagaccgattaaataggttaaggcatacccgaggctcagattatccagtgccagactgagctgcctgctttccatgccggaatgacgcagtgtatcgccagcaccgaccagaaccggtgtgctcgtcatagagcctgctaacataccggccgtcaggccaatatcccagccaaacagcttacctaaccctaaggcgatcaccagcgcactgccaaccatcaccagtgctaacattaggtaatttttcccatcgcgaaaaaaaatggaaaaaaagttcggtccggcttcgaccccgacgcagaaaataaacagcataaagccaagattaagcgcatcggtgttaatgctgaaatgttgttggcctaataacaggcttacgactaaaacgccaatggaattacccagttggatgctaccaagtcgtaactttccgagacatagcccaagcgcgaggaccacaaataataacagaatgtaattcccatttaacaattcggcgacgtttatattcacggaggctaacttcttgtttactagtaagctgttgaaagaaatggtaatttacgataatgttttttaccagaattcagggcgcagattcattcagcgcacctaaacgatagtaaagtaacaatatattttactagtgtaatcacattaggtatcaacggctatatgaattgcgttggcctatattagcatggaatgcgaagcggctttatcttactgaacgccacactggcgaaaaatgtgttcgatagacgcagtgtcaggaggaacgagtgaaacataaacaacgttgggcgggggcaatctgctgttttgtcctcttcattgtggtgtgcctttttctggcgacgcacatgaaaggcgcttttcgggctgccgggcatcctgaaatcggcttgctatttttcattcttcctggagcagtcgccagcttctttagtcagcgtagagaagtcctgaaacctctgtttggcgcaatgctggcggcaccctgtagcatgctcattatgcggctgttttttagtccgacgcgcagtttctggcaagagctggcatggttactaagcgcggtgttctggtgtgcgctgggggcactgtgtttcttatttatcagtagtttgtttaaaccacagcacagaaaaaatcagtaaagccctcaacgcgagggcttgtcagacgatcaggcgtccagattttctttcacccatgcagcaaaatcggtatagccgccgatatgttgctgatcgacaaaaatctgcggcacggtttctacgggtttacctgccttttgttgtagatcttctttagtgatcccttccgcacgaatatctacatactgatactgaaaatcatcgcgttcattgctcaatttctcagccagatcttttgcacgcacacagtaagggcaaccgctacgaccaaaaataacggtttgcattatttctctcctcatagatttatgcctgtaatgatcacgctaaaatgtattcgctgaaagtaggtttaacctgttgcattaattgctaaaagctataactgttaaacacaatacagtgaaaagttttagactgaaggctcactttgcagagggaagcgtatgcgcgcgatcggtaaattgcctaaaggcgtgttgatactggaatttatcggaatgatgctactggcggtggcgctgctgagcgtaagcgactccctgagcctgcctgagccattttctcggccagaagtgcagattctgatgatttttctcggtgttttgctcatgcttcccgctgcggtggtggttattcttcaggtggcaaaacgtcttgccccacagctgatgaaccgtccaccgcaatatagtcgtagtgaaagagaaaaagataatgacgccaaccattgaacttatttgtggccatcgctccattcgccatttcactgatgaacccatttccgaagcgcagcgtgaggcgattattaacagcgcccgtgcgacgtccagttccagttttttgcagtgcagtagcattattcgcattaccgacaaagcgttacgtgaagaactggtgacgctgaccggcgggcaaaaacacgtagcgcaagcggcggagttctgggtgttctgtgccgactttaaccgccatttacagatctgtccggatgctcagctcggcctggcggaacaactgttgctcggtgtcgttgatacggcaatgatggcgcagaatgcattaatcgcagcggaaagcctgggattgggcggggtatatatcggcggcctgcgcaataatattgaagcggtgacgaaactgcttaaattaccgcagcatgttctgccgctgtttgggctgtgccttggctggcctgcggataatccggatcttaagccgcgtttaccggcctccattttggtgcatgaaaacagctatcaaccgctggataaaggcgcactggcgcagtatgacgagcaactggcggaatattacctcacccgtggcagcaataatcgccgggatacctggagcgatcatatccgccgaacaatcattaaagaaagccgcccatttattctggattatttgcacaaacagggttgggcgacgcgctaaaaccgccacgtcgatgtatgatacgcgggcttttgaccaggtctgacagagaggtgcagggtgaaaattgccatattgtcccgggatggaacgctctatagctgtaagcggctgcgtgaagccgctatacagcgcggtcacctggttgaaattcttgatccgctttcttgctacatgaacataaatcctgcggcgtcttctattcactacaaaggccgcaagttaccccattttgacgcagtgatcccgcgtattggcaccgccattaccttttatgggacggcggcactgcgccagttcgagatgctggggagctatccgctcaatgagagcgtcgccattgcccgggcgcgtgacaaattgcgttccatgcaactgctggcgcgtcagggcatcgacctgcctgtcacgggcattgcgcatagcccggatgataccagcgatttaatcgacatggtcggtggtgcgccgctggtggtcaagttggttgaaggcacgcagggaattggcgtcgtgctggcggagacgcgtcaggcggcggaaagcgtgattgacgctttccgcggtctgaacgcgcatattctggtgcaggaatatatcaaagaggcgcaagggtgcgatatccgctgtctggttgttggcgatgaagtggtcgctgcgattgaacggcgggcgaaagagggcgattttcgttccaatttgcatcgtggcggcgcggcaagcgtcgccagtatcacaccacaggagcgtgaaatcgcgataaaagccgcgcgaacgatggcgctggacgttgctggtgtggatattctgcgtgctaatcgcgggccgttggtgatggaggtgaatgcgagcccggggctggaaggaatagaaaaaaccaccggtatcgacatcgcgggtaaaatgatccgctggatcgaacgccacgctacgacagaatattgcctgaaaacgggtggttaatcgcaatcacattactgatcatggttttgcctgcgctttttgcgtaagctgtgccggtctttttatcgaaagaggttgtacaaaattatgacaagcctggtcgttcctggtctggatacgctgcgtcaatggctcgatgacctggggatgagtttttttgaatgtgataactgtcaggctctgcatctgccccatatgcagaatttcgacggtgtctttgatgccaaaatcgatctgatcgataacacgatcctgttttctgccatggcggaagtccgacctagtgccgtattgccgctggcggcggatttatctgccatcaatgccagtagcctgaccgtgaaagcatttcttgatatgcaggatgataatctgccaaagctggtggtttgccagtctttatccgttatgcagggcgtaacctatgagcagtttgcatggttcgtgcgtcagagcgaagagcagattagcatggtcattcttgaagctaatgcccatcaactgctgttaccgactgatgatgaagggcaaaacaacgttaccgaaaactatttcctccactgataactcctttcgagcacgcagtcgctggtgcagtggctgcgcgctgcaaaattatctgctgtttttaaccttttcttaaagattatttcacttctcttgtgtcgatttggctttatcacatagagcaaatatgcataaaaatttgttaaataccgttttttaatccgagctatagtctcaaaccctggctaaagttattcttgcgatgcttttatatagcgagcagtgctggccgggagaaagttctcttttcttacaccgcgccgataaaaaatatgcacgtttattgcatatctttcagtgtgacaacttttgttcgtttgttaacgaactttcagaaggaaagagatatgaccgccttaaataaaaaatggctaagcggtctggttgcgggtgctctgatggccgtctctgtcggcacgctcgcggctgaacaaaaaacactccacatttataactggtctgattatatcgccccggacacggtggccaattttgaaaaagaaaccggtattaaagtcgtctacgatgttttcgactctaacgaagtactggaaggcaaattaatggccgggagtaccggctttgatctggtggttccatctgccagctttctggagcgccagttgactgcgggagttttccagccgctggacaaaagcaaattgccggagtggaagaatctcgacccggaactgctgaagctggtcgccaaacacgatcccgacaataaatttgctatgccctatatgtgggcgacgaccgggattggctataacgttgataaagttaaagcggtgctgggcgaaaacgcgcccgtcgatagctgggacttgatcctcaaacctgaaaatctggaaaaactgaaaagctgcggtgtctctttcctggatgcgccagaagaagtttttgctaccgtgttgaattatctcggcaaagatcccaacagcactaaagcggatgattacaccggaccggcaacagatctgctgttaaagctgcgcccgaacattcgttatttccatagttctcaatacattaacgacctggcaaacggcgatatttgcgtcgctatcggctgggcaggtgatgtctggcaggcgagtaaccgcgcgaaggaagcgaagaatggcgtgaatgtcagcttcagcattccaaaagaaggggcgatggcgttctttgatgtattcgccatgcctgcggatgccaaaaacaaagacgaagcctatcagttcctgaattacctgctgcgcccggatgtagtagcgcatatttccgaccatgtgttctatgccaacgccaataaagcagccacgccgctggtgagtgcggaagtccgtgagaacccaggtatttatccgcctgcggatgttcgtgcgaagctgttcactctgaaagtgcaggatccgaaaatcgaccgtgtgcgcacccgcgcgtggaccaaagtgaagagcggaaaataatccgcagtcgtagatgccggaggggcgcaccacacccgccggcaattcgcaccattatggtgcgcttgcacacattcaatgccggagagcagccgtgaatgacgctatccctcgcccgcaggcgaaaacccgtaaggcgctgacgccgctattagaaatccgcaacctgaccaaatcctacgatggtcaacatgcggtggatgatgtcagcctgaccatctacaaaggtgaaatcttcgcgctgctgggcgcatccggctgtggcaagtccacgctgctgcgtatgctggcaggtttcgaacaaccttctgccggacagataatgcttgatggcgtcgatttgagtcaggttccgccttacctgcgccccatcaatatgatgtttcagtcttacgcgctgtttccgcatatgaccgtggaacagaacatcgcttttggcctgaaacaggacaaactaccgaaagcggaaattgccagccgggtcaatgagatgctcggcctggtgcatatgcaggagttcgccaaacgcaaaccgcatcagctttccggtggtcagcgacaacgtgtggccctggcccgaagccttgcgaagcgcccgaaactattactgctcgatgagccgatgggcgcgctggataaaaagctgcgtgacaggatgcagcttgaagtggtggatattctggagcgcgtcggtgtgacttgtgtgatggtcacccacgatcaggaagaggcgatgaccatggcggggcgcatcgccattatgaatcgtgggaaatttgtccagattggcgaaccggaagagatctacgagcatccgactacccgctatagcgccgaatttattggcagcgtaaacgtctttgaaggcgtactcaaagagcgtcaggaagatggcctggtgcttgatagcccggggctggtgcatccactgaaagtcgacgcggatgccagcgtggtcgataacgtgccggtacatgtggcgctgcgcccggaaaaaatcatgctttgcgaagagccgcccgccaatggttgtaacttcgcggtgggggaggtgatacacattgcctatctcggcgatcttagcgtgtatcacgttcgtctgaaaagtgggcagatgattagcgcccagctacaaaacgcccatcgtcatcgtaaagggttaccgacctggggcgacgaagtgcgtttgtgctgggaagtggacagctgtgtggtgctgacggtttaaggagcaaagatgagtacacttgaacctgctgcccagagcaaaccgccgggcggatttaagctgtggttgagccagctgcaaatgaagcatgggcgcaaactggtcattgcgttgccatatatctggttgatcttgctgtttctgctgccatttctgattgtctttaaaataagcctggcggagatggcgcgcgctattccaccttataccgaactgatggagtgggctgacgggcaactgtccatcactcttaatctcggtaattttctgcaactgaccgacgatccgctctatttcgatgcttatctccagagcctacaggtggctgcgattagcacattttgctgtttactgatcggctatccgctggcgtgggcggtggcgcacagtaagcctagcacccgtaatattttattactactggtgatcctgccgagctggaccagctttctgatccgcgtttatgcctggatgggaatattaaaaaacaacggtgtgctgaataattttctgctgtggctgggggttatcgatcaaccgctgaccattctgcataccaatctggccgtttatatcggcattgtttacgcttacgtgccgtttatggtactgccgatttataccgcgttgattcgtattgattatagcctggtggaagcagcgctggatctcggtgcacgaccgctgaaaacgttctttactgtgatcgtgccgctgactaaaggtgggattattgccggaagcatgctggtgtttatcccggctgtgggcgagtttgtgatcccggaactgctcggtggcccggacagcatcatgatcgggcgcgtgctatggcaagagtttttcaataaccgcgactggccggtggccagcgcggtagcgatcatcatgttgctgctgctaattgtgccgataatgtggttccacaaacaccagcaaaaaagcgtgggagaacacggatgaataatttaccggtagttcgtagcccctggcggattgtgattttgctgctgggctttacctttctctacgcgccaatgctgatgctggttatctatagctttaacagcagcaagctggtgacggtgtgggccggctggagtacgcgctggtatggtgagttattgcgcgatgacgcgatgatgagtgcggttggtttaagtctgacaattgcggcctgtgcggcgacggcggcggcgatcctcggaactattgcggcggtggtgctggtgcgctttggcaggtttcgcggaagtaatggctttgcctttatgatcaccgcgccgctggtaatgccagatgtcatcacgggcttgagcctgttgttattattcgtcgcgcttgctcatgccattggctggcctgcggaccgcggtatgctcaccatctggctggcgcatgtcactttttgtacggcttatgtggcggtcgttatttctagtagattgcgggaactggatcgcagcatagaagaagcagcgatggatctcggtgcgacgccgctgaaagtgtttttcgtcattacgctaccgatgatcatgcccgcgatcatttctggctggttactggcttttactttgagccttgatgatctggtgatcgccagctttgtttccgggccgggagccaccacgttaccgatgctggtcttttccagcgtgcggatgggggtgaatccggaaatcaacgccctggcaacattgatcctcggcgcggtcggaattgtcggatttatcgcctggtatctgatggctcgcgcagaaaaacagcggatacgcgacatccagcgtgcaagacgtggctgaagacactaaaatttgccaacctggctacataatgccgcgcatgtcgcggcattgttttcatggaagacgaaacgttgggattttttaagaaaacatctagttctcatgctcgcctgaatgtgcctgcgctggtgcaggtggcggcgctcgccattattatgatccgtggcctcgacgtgctgatgattttcaatacgctgggcgtgcgcggtattggcgagttcattcatcgcagcgtacaaacctggagtttaacgctggtctttttaagcagtctggtgctggttttcattgagatctggtgtgcgtttagtctggtgaaagggcgtcgctgggcgcgctggctatatctgctgacacaaatcaccgccgcaagttacttgtgggcggctagcctggggtacggttatccggagctgttcagcattcccggtgaaagtaaacgtgaaatcttccatagcctgatgctgcagaagctgccggatatgctcatcctgatgctgctgttcgttcccagcaccagtcggcggttcttccagttgcaataatgtgtataatcgtcgcccctgatgatgtgaaggtcaatgtatgcagtgcgcactttacgacgcgggtcgctgtcgttcctgtcagtggataatgcagccgattccagagcaactctccgctaaaaccgccgatcttaaaaatctgctcgccgactttccggttgaggaatggtgcgcgccggtgagtggcccggaacaagggtttcgtaataaagccaaaatggtggtgagtggtagcgttgaaaaaccactgctcggtatgctgcatcgcgatggcacaccagaagacctttgtgactgcccgctttatcctgccagttttgcgcccgtttttgcggcgctaaaaccgtttatcgcccgagcggggttaacgccctacaacgtggcgcgtaagcgtggcgaactgaaatacattctgctgactgaaagccagagtgatggaggcatgatgctgcgctttgtactgcgttctgataccaagctggcgcaactgcgtaaggcgctgccgtggttacacgaacaactaccgcagctgaaagttattaccgtcaatattcagccggtacatatggcgattatggaaggggagacggagatctacctgaccgaacaacaggcactggcggagcgttttaatgacgtaccgctgtggatccgtccgcaaagtttcttccagactaatccggcggtcgccagccagttgtacgccaccgcgcgcgactgggtacgacagctgccggttaaacatatgtgggatctgttctgcggtgtggggggctttggtttacactgcgcgacgcctgacatgcagttaaccgggatcgaaattgcaagtgaggccattgcctgtgcaaagcagagtgccgctgaactgggcttaacgcgtttgcaatttcaggcgctggactccactcagtttgccaccgctcagggggatgtgccggagctggtgctggttaacccgccgcgccgcggcattggtaaaccgctgtgtgattatctcagtacgatggcaccgcgttttatcatctactccagctgtaacgcccaaactatggcgaaagatatccgcgaactgcctgggtttcgtattgaacgggtgcagcttttcgatatgttcccgcataccgcgcactatgaagtgctgacgctgctggtgaagcaataaaaaagccgcatgtgcggcttcagattgctgacaaagtgcgcgttgtttatgccggatgcggcgtaaacgccttatccggcctacaaaagcgtgcaaattcaatacattgcatgggccatgtaggcctgataagcgtagcgcatcaggcaattttacctttgtcatcagtctcaagccgcggttgcggctttctgaatcttactgtgggaaccactggtcactgattttttgataagtaccgtcagctttaattgctgccagcgcgttattcagtttttccagcagggctttgttatccggacgtacagcgatgcccaggccggtgccaaaatattgcggatcggtcactttctcagtagcaacaccaagttgtggattggttttcagccattcgtttaccaccgctgtgtcaccaaataccccatcaatacgaccatttttcagatcgataaaggcattctgataactgtcataagagacagttttcacttccgggtgctgatcctgaatatatttctggtgcgtagtaccgttttccatcccaatacgtttgcctttcagatcggcaaacgttttgtaggtatcttttttggcaatcacgacggcactgttttcatagtagggcgtggtaaagcttacctgtttgctacgctccggggtgatatccataccggagattacggcgtcatattttctgaatttcagggacgggatcaggctgtcgaacgcgtgattagtaaaagtacattctgcctgcatttgtttgcacaaggcttttgccagatcgatatcaaagccgacaatctcattattagcacctatagattcaaagggtggataggtggcactaacgccaaaattgattttctctgcggcagaagcaccgaaagtaaaggaagcaagtaaagcggcaagaactaactttttcatgatggaactcccgtctgtcaatcttatgatttttggccgtgtctgcggcatgggataacaatgccatcaagtgaatttatatgcaataaacatgattaaataatttaaatgaaataaaaaagacggacaacttagtgggttgtccgtcttcattataagaatttatgcactatgtaggccggataaggcgtccccgccgcatccggcacaggcaccgtgctgatgtctgatgcgacgctggcgcgtcttatcagacctacaaaaccccccggcgaatgtacgcagccacattaatttcgccgttcgaatgccagcgctttgcgctcgatcagacgcatcatcagcgtcagcaggccgttaacgaccaggtaaataatccctgccgcaccgaacaccattacatcgtaggtgcgtccgtacaacaactggctgtatcccatcacttccatcagcgtaatggtgtatgccagagaggtacttttgaataccagcaccacttcgttggaataagaagagaggctgcgtttaaaggcatacggcagcaggatcgccagcgtatcttttttgctcattcccagggcgctacaggactgccactgaccttccgggatcgcacgaattgcaccgtaaaacagctgcgtggtatacgccgcactattcaggctcaacgcaatcagcgcacataaccacggttcactcaacaaatgccacagtgccggatactcctgcaaagtcggaaactggcccggcccgtaataaatcaggaagatctgcaccagcagcggcgtaccggtaaacagcgtgatataaccccgcaccagccacaccagcaccggcgttttcagcgtcaggatgatggtaaaaatcaatgccagaatcagtgccacaatcaggctggcaacggttagcgtcaggctggtgtgtagccctttcatcagttcgggtaaatactcaaacattagctgggcctccgctcaaaacgtgtcgcgcgcaggtcaatgcgtttgagaatgtactgactgagcagggtgatcaccaggtaaatcgccgccgccacaatgtaccaggtaaatggttcctgggtacgagtagcgatgctttttgtttgcagcattaaatcattcacactaatcaaactgaccagcgcggtatctttcagcagcaccagccactggttaccgaggccaggcagcgcatgacgccacatctgcggcatcaccagacggaaaaagatagcgcttttgctcagccccagcgcctgaccagactcccactgacccaccggcaccgctttcaacgcgccccgaagcgtttggctggcataggcggcatacagcagactcagagcgatgacaccacaaaggaacgggctaacgtcgaagttctcaatgtccatctgcactgggatctgcacgaacccaagattgatagtgaagccatcgctaagcgtcagcagcagctggctggagccaaaatagataaacagcaccaccagaatttctggcaggccacgcagaatggttaccagcgcactacctgcccacgcgacaggacgccattttgcgctctcccataccgcaaagaacatcgccagcgccagcccgacaatcaatgcacaaacggcaaggccgacggtcatcccggcggcgcttgctaaaggaaaaaattcattcatcaggaattacttctggaaccatttgttgtagatggtttcgtaagtgccatctttcttcactttttccagcgcagtgttgagtttctgctgcagctcagtgttgccctgacgtaccgcgatgccgaggccagtgccgaagtaatctttatcggtcactttgtcgcccaccgccgccagtttcgggttatctttcagccactcagtgaccactgcggtgtcaccgaagacgccgtcgatacgcccgttttgcagatccagttttgcgttctggtagctgtcatacggaacggtagtgatttccgggtgcttatccataatgaatttctggtgtgtcgtcccgttctgtacgccgacttttttgcctttcagctgatcaacactggtgtatttgccttgctgacccacaaacagggcagagttgtcatagtacggggtggtaaacagcacctgcttttcacgctccggagtgatatccatgcccgccatcacggcttctacgcgacggaatttcaggcttgggatcaggctgtcaaacgcctggttagagaaagtgcaggttgcatcaatctctttacacagcgcttgtgccaggtcgacgtcaaaaccaacgatctggttgtttgcatcaatgctttcaaacggaggataggaggcttcggtagcaaaacgaatggtttcggcagctgtggcggaaagactaaaacctgcaattaacgcggcaatcagaacttttttcattgttgttatcccgaatcttagtgagagagatagtttttaaatgcttcggtttgcggctcggtaaagcagctcgcgtcgccttgttctacgatatgaccattttccatatacaccactcggctggcggttttacgcgccacttcaacttcgtgggtgacgatcacctgggtaatattcgtttctgccagctcacgaatgatgctgacgatttgtgccgtaatttccgggtccagtgcggcggtcggttcatcgaacagcagtacctgcggttccatcatcaacgcacgggcaatagcaacacgctgctgctgaccaccagaaagatgcagcgggtaacgatcgctataaggtttgagacgcagacgttccagcagtttttctgcacgggccagcgcctgatctttactcaaccccagtacacggcagggcgcttcaatcaggttttgctgcacggtcagatgcggccacaggttgtattgctgaaacaccatgccaacgttacgacgcaaatcgcgaatcgctttgtcagagggtgttttggtgaaatcgaaatggttgcctgcaatgttgagcgtaccggagcgcggcatctcaagcagattgagtacacgcagcaggctgcttttacccgcgccgctggggccaagtaacaccagcgtttcgccctgtgggcaatccagcgtgatatcgaacagcgcctgatgcgcgccgtagaagcaattaatgccgtttaattgaatactcattgacactcgtatactggcagtctgatagctattgaggtcgaagatagtacctttgacagaataattatgcaatatttctgctttaaaagttaaaagcaaagcgcattattcaataaacatagcacaaaataacgggggcggtggtcggcgagcataaatgtcggcattcctcacgaaatgccggacaatttacggggtttattggttgatcaaggcgttagcgattctcgatggactgacggagcgtacccgccgtggcatgaacgctaccgcctaagtaacgcacatcgtcgatgacccaacactggccttcctgaatcattaacacttcatcctgccaaccctggtcaccctgtttgagatccacgcgcaatggaatgttacgggcatcacgattagggatagtgcttgcactggcaacgtgggcgctatctggcaaggtggttcgactggagaatggatcgttggtcagtagttcccgatggttattatcccgggaggcatcgctaagcagtgtcgccagtttgtcgctcagataagggcgcaaggcggtgatgtcgttgctgcggtgcaaaatgcggtagtcataaaattgctgggccacgttatccgggcctccttcaacgcaaggaccactgcgtgtgccgttatctttataagctggagtgactgtggtgcaggcactgaggagcagtgcgcaggggataagcattgtcaatttgctgtagcgcataatgatttccttataagcgatcgctctgaaagcgttctacgataataatgatatcctttcaataatagcgtatcagtctgataatgcttttgagatcgaaggcttagcaaacaaggagatcgatcatgcaattttctacaaccccaactctggaaggccagaccatcgttgaatattgcggtgtggtgaccggcgaagcgattttaggtgccaatattttccgtgatttctttgccggtatccgcgatatcgttggcggacgttccggtgcgtatgaaaaagaactgcgtaaagcacgggagatcgcctttgaggaattaggctcccaggcgcgggcgctgggggccgatgccgtcgtcggtattgatatcgactacgaaacggtcgggcaaaacggcagtatgctgatggttagcgtcagcggtacggcggtgaaaacgcgtcgatgagaagattcttctggctggtcgctgccgctctgttattggcagggtgtgcaggcgaaaaaggcattgtcgagaaagagggatatcagcttgatacccgacgccaggcgcaggcggcgtatccgcgcattaaagtgctggtgatccactacaccgcagatgattttgatagcagcctggcgacactgaccgataagcaggtcagcagccattatctggtccctgcggtaccaccgcgatacaacggtaaaccgcgcatctggcaactggtgccggaacaagaactggcctggcatgcggggattagcgcctggcgcggggcaacgcgccttaacgacacctctattggcattgagctggaaaaccgtggctggcaaaaaagcgccggagtgaaatattttgccccgtttgaaccggcacagattcaggcgcttattccactggcgaaagatattattgcccgttatcacatcaagccggaaaacgtagtggcacatgcggatatcgcaccgcagcgcaaagacgatccggggccattatttccctggcagcaactggcgcagcaggggattggtgcctggccggatgcgcagcgggttaacttttaccttgccgggcgcgcgccgcacacaccggtagataccgcgagtttgctggagcttttggcgcgctacggttatgacgttaaacctgatatgacaccgcgcgagcagcggcgcgtgattatggcattccagatgcatttccgcccgacgttatataacggcgaagcggatgcagaaactcaggcgattgccgaagcattgctggagaaatacgggcaggattaacgcggcagttttccgtggtcgcgtagccaggcggcagttttctcgataccttcatccagggtgatgaccggctgataacctaactcttcctgcgcacgcgtaatatccagcgtaaagtcaaaattcaacttggagacgccgtagtgggtcagcggcggctcttttgcactcttgcggcctaaacgctccatgctgcgggcgatcatatccagcatcgggtaggggacggaacgaatacgacagtcaatattcaactcgtcgatcagcttctgcacgatgctgcgcagtgtgcgatgctcgccgttggtgatgttgtacacacgcccggaaggtagcttatcgcaggcttcctggcttgccagccacattgcgtgcacggcattttcatagtaggtcatatcgaccagcgcactgccgccatgcggtaacagaatactgccgtagtggtgcatcatatgcgccagacggggaataaagactttatcgtgcggtccgaacagactttgtgggcgcagaatagtaaagcgcgtttgtggattcgcctggctaagcatattgatcacttcttcgctggctgctttgctgcgggcaaactcgttggcgaagcggtgagggcgaaaatcttctttaatatcgcgatggtggtgataatcgaagtacagggagggggaagagatatgaataaagttacgcacaccccaggcgacagcccattcacccaggcggcgagtggcgcgaacgttagccagatcgaaagcctgttgtgtcccccagggactggtaaagctggagcagtgccacagcgtatcaatgcccgcgagcatcactttagcttgactactaaccagctcggtcagatccgccggaacaaactctgcgcccattttttccagcaatttgcccattgcctcgttgcgaccggtcgctcgcacgctgatgcctttctggcataaaaactctaccgcgtttcgacctaagccgctggtggcgccggtaaccagtaccttcatatcaatccactgttgttgagaaaataacgtgcgcattcttccgtgatttcccccatgatgcaatgggaaacatgaaagaataacgcaggttttgtcgattaatctgtgctttgttctgccagtctggcgatttgttttgccattccgcgaaaaataaacagatgcgcggggatcatcaataaccagtaaaacagccccggcataccgtgcggatgccagaaagcgcggacatcgatagtacgatagtcgcctttatcttccaggctaaaacacagtcgtcccagccccggcgctttcatgccaaataacaacgtaagttgtttttccggttcaacgacaatcactttccagctatccaccgcatcgccagtctgtaaatattcgcgctccgggcggcctttcgccagcttatgaccgatcgcgcggtccatcaacgcccgtgtctgccacaaaatattgccaaagaaataacgctctttaccgccgatttggttcactacctgccataaagcagcaaggctggcggacgttttaacggtaaaccccgcctgtttggcaaaataaccgtactccggtcgccagcgggcaaaggcctgagcgtcgtagccccagtcgctggagttgaccagtttttcctcctctttcaacgtgctacgtaccgcgtcatcgaaagcgatcagccgttgtgggatgagtgcacgtagcgcggtatcatccgccagcagatcgtgtttcagcccctgaatcaacgccctggcggtggtgggcggtacggaagtaatcacattgagaaaccacacgctaatccagcgggtggggagggggatggggatcaaccagcggcgcttaccgctcaccgccataaaatgttcaaactgttgctgataactgagcacctctggtccggcggcttcgaagatgcggtgttcgctggccggatgatctaacaacgcaaccagatagtgcagcaagttttccagcgcaatgggcgtggtgcgactacgaacccagcgcggaggcgttaagactggcaggttgtagaccatatcgcgcatgacttcgaacgccgcggaacctgcgccaacgataattccggcccgcagttcggtcacgggtacattcgcttcacgcagaatgtccgccgtagcctgacgagcacgcagatgatcgctctgctcatgtggcggggcctgcaagctactaagaaagattaattgcttaactggtacttcacgtagcgcatcgcggacgttgagagccacctggcgctcctgagcgataaaatcgccgccttcgcccatgctgtgcaccagaaaatagaccgtatcgatatcctgcaacagggccggtaggttatccggccagctgagatcgactttatggcaactgacgtttgccagttgcagctttgcaagcctgtcgacatgacgtgccgccgccaggatctgatgcccttgctggctgagtgtgcgcaccagatgctgaccaatgtagccactggcaccgagaactaaaatgcgttgcggcacgtctctctccttaacgcgccaggaatgcacgccagtgggcggcgacttccgccagttgttcgcggctgacgtcaagatgcgtcaccaggcggacaatcgggctggcgttaatcagcacgtttctcgctttcatgtattcgcctaacgcggcagcattttcttccccgacgcgaacaaacagcatattggtgtcctgacgcatcacatccgcgcctgcttcacgcagctgctccgccatccaggcagcgttgtcgtggtcttcctgcaagcgcgcaacgttatttttcagggcatatatcccggcggcagccagaatgccggactggcgcatcccgccacctgtcattttccgccagcgaatggcacgtttaatgtaatcacgattaccgacgagtaaactaccgactggcgtcccaagacctttgctcaggcaaatggtgaagctatcacaatattgcgtgatctctttcagttcgcagccgtaagccaccacggcattaaagatgcgcgcaccgtcaacatgcagcgccagattgcgctcgcgggtaaattcccatgcttctttcaggtattcccgcggcaacactttgccgttgtgggtgttttccagactgagtaatttggtgcgggcgaaatggatatcgtcgggtttgattttcatcgccactttatccagcggtagcgtgccgtcggcagccgcgtctatgggttgcggttgaatactgcccagcaccgccgcgccaccggcttcaaacagatagttatgcgcggcctgaccgacaatatactcttcgccgcgttcgcagtgactgagcagagcgaccaggttggcctgagtgccggtaggcagaaaaatggcggcttctttaccggaaagctctgctgcgtagtcctgcagagcattaacggtagggtcgtctccgtaaacgtcgtccccaaccggggcggccatcatcgcttcgagcatggcgcggcttggtcgggtaacggtatcactgcgtaaatcaatcatggcatgtccttattatgacgggaaatgccaccctttttaccttagccagtttgttttcgccagttcgatcacttcatcaccgcgtccgctgatgattgcgcgcagcatatacaggctgaaacctttggcctgttcgagtttgatctgcggtggaatggctaactcttctttggcgaccaccacatccaccaacaccggaccgtcgatggagaaggcgcgttgcagggcttcatcaacttcagacgctttttctacacggatacccgtaatgccgcacgcttcggcaatgcgggcaaagtttgtgtcgtgtagttcggtgccgtcagtcaaatagccaccagctttcatctccatcgccacaaagcccagcacgctgttgttaaagacgacaattttcactggcagtttcatctgcactacactgaggaaatcgcccatcaacatgctaaaaccgccatcgccgcacatggcgaccacctgacgttctggctctgtcgcctgcgcacccagcgcctgcggcatggcgttagccatgctaccgtggttaaagctacctaacaggcgacgcttgccgttcatttttagataacgtgccgcccacaccgttggcgtaccaacgtcacaggtgaaaatagcgtcatcggcggcaaaatgactaatttgctgcgccagatattgcgggtgaatggctttctcgctcggtttagctaaatcgtccagccctttgcgggcgtcgcggtaatcttccagcgctttatccagaaacttgcgatcggctttttcttccaccaatggaagcaatgcacgcagagtgctcttgatatcgccgaccagtgccatatccaccttgctgtgagcgccgatgctggctgggttgatatcaatctgaatgattttggcatcggtcgggtagaaggcgcggtagggaaattgcgtgccgagtagcactaacgtgtcggcgttcatcatggtatggaaaccactgctgaagccgattaacccggtcattccaacatcatacggattatcgtattcgacatgttctttaccgcgcagggcatgaacaataggcgctttaattttcccggcaaactcaactaactctttatgcgcccccgcgcagccgctgccacacatcagggcgatattgctggaataacgcagcagttgcgccagtttgcgtaactcttcttcttccggcgtcacgactggttgtggcgcatgataccagtgcatggttgccccttctggcgcaggttttaacgccacgtcgcctggtaacacgacaacgctaacgccacggttaagcaccgctttgcgcatggcaatcgccagtacttgtgggatctgctccgggctggaaaccagctcgcaatagtgactacattcgcggaatagctcttgtgggtgggtttcctggaaatagccgctgccaatttcgctggagggaatatgagcggcaatcgccagtaccggaacgtgattgcggtggcaatcgaacaggccgttgattaagtgcaggttgccggggccgcagcttccggcgcagaccgccagttctccgctaagttgtgcttcagcgccagcggcaaaggccgccacttcttcgtggcgggtggacatccactcgatggtgcccatgcgattaagactgtcactaagaccgttcagagagtcgcctgtgactccccagatgcgtttcacccctgcgctttcgagtgttttggcgatataagctgcaaccgtttgtttcatggttctccatctcctgaatgtgataacggtaacaagtttagttcatctgacggagggggaagggatgggagagaaaggaggcactaacggttaaatagcccgatgaaaggaatatcatcgggcataaggcgattatgcgagaaccaaatccccctgcggatggcaggagcaggccagtacgtaaccttcagcgatttcggcgtcggtcagcgtcattgtgctgctcaccgtatattcaccggaaaccacttttgtcttacagcagccgcaaacacccgcacggcaggcagcgacaaccggaacgttattgctttccagcgcctccagtagcgtggtgccaaccggggcgtaaaattctcgtgccggttgcagtttggtgaatttcagaccgctggtcgccgcttctgctactggggtgaagaatttctctttaaagaaacgcgtcacgccgagcgctttcacttcctgctctacccaatccatatacggagccgggccgcaggtcatcacggtacgactagctaagtcaggtacacctgccagcagttcgcgagtgagacgaccagcgataaagccttcggtaacgttattttctgccaccagcgttaccggatagttacgccactcatcggcgaaaataacatcctgcggcgtacgcacgttgtagatcacccgcacatcggcctgtggacggttcttcgcaagccagcgacgcatgctcataatcggcgtgacgccgcagcctgccgccagcaacaggaatttatcttctgctttatcgtcgcaggtaaattcccccatcgcgtcgctaagccagagataatcaccgcgttttacatcgcgcgtcagccactgggagccgacaccgtcatcaatccgccgcacggtcagggtgatatattcactcacgcctggcgtggaggaaatggtgtaagcacgcagcgtttccgcactgtttcgcacgctgaccagtgcatattgcccggcgcgatatgggtagtaatcgtggcaaatcagggaaatcgtccacacatccggcgtttcttgcgtaatgtgatgaacctgcatccgccacgggcattgattcgttggcatcgtcatcgacaaactccttacgcgctcaacagttgcttcatgtcttcttcaacagtggtgatagaacgcaggccgaatttctcgttcagcaccgccagcaggtctggtgtcaggaaaccaggtgcagtcgggccggtgacgatatttttcacgcccagagaaagcagcgtcagcagaatgacgatcgctttctgttcaaaccaggagagcaccaggctcagcggcagatcgttgacaccgcagcccagtttctctgccagagtgacagccagaataatcgcactgtaagcatcgttacattgacctgcatctaccagacgcggcagaccttcgatatcgccaaactcaagtttgttaaagcgatatttaccacaggcgagggtcaggatcaggcagtcatccggcacgctggtggcgaaatcggtgaagtagtggcgctcgccgcgtgcgccgtcacagccaccaagcaggaagatatgacgcagtttttcacggctcaccagatcaatcagcgtatcagcagcgccaagcagcgtctggcgaccaaaacccacggtgataaggtgcggaatttcgctgtacgggaagcctgccatctgttgcgcctgggtgataaccgcagagaaatcatcaccgtccagatgacgcacgccaggccagccaacaatgctgcgggtccagatacgatcgtcataagcgcctacggttgggtcgatgatgcagttgctggtcatcacgatggggccagggaaacgagcgaactccacttgctgattctgccagccgctgccgtagttaccgaccagatgcttgaatttacgcagctccgggtagccatgcgcaggcagcatttcgccgtgggtgtagacattaacgcccgtgccttcggtctgttccagcaggttgtagagatctttgagatcgtgaccggaaatcagaatgcatttacccgccgtcgctttgacgttgacctgggttggcgtcgggtgaccgtatttaccggtttcgcctgcatccagaatgctcatcactttgaagttcatctggccgatttccatactacactcaagaagcgcgttcatatcggcaggccaggtccccagccacgccatgattttatggtactgggcataaatatcgttgtcgtattgaccgagaacatgcgcgtgttccatataggccgccgcacctttcaggccatacaggcacagcagacgcaggccgagaatgttttcgccaatcgccgctttatctttgttaggggtaaattctgctgcctgacgttgcagctcgccgagatcgtcgctcaccagttgcaggtcagccatcgggttatcgacgcgcgcgttggcatctacagccaggcattgcgctttcagcgcctcgcgcagggcaatcgcttcacgagcgtagccgacaatacgcggagaatcgaagttaacgttggtcagggtactgaaaaaggcacgtggcgcgaagctgtcaacatcgtggttgatgatgccgtattcacgcgcttttaccgcccaggcagaaagcccttgcagcgccgcgatgagtaaatcctgaaggtcagaagtttccgccgttttaccacacatcccctgcgcgtaactgcagccgtttcctgccggagtacggatagtttgttcacattgcacacaaaacatgatcacaccttttaaagttatatttaatatacatgtttaaggttaagacgcttaacgcggggataaaagggatttttcatgcaactttaagggagattgatttagcgcaattttggcggcagggatctaccgccagagaggtattacgcagagaaaaaggcgatgaggatcggcactaacaggctaagaataaaaccgtgaacaattgccgccgggaccatatccagcccgccagtacgttgaagaacgggcagggtgaaatccatacttgtggcaccgcataagcccagtgcagtagagcggctgcggcgaatcagcccagggatcaacataatagcaatcagttcacgggccagatcattaaaaaacgccgcgctcccgattaccggaccaaaagattcggtcaataaaataccggaaagagaataccagccgaaaccggaggccattgccagcgcggtattgatggggagatcaagaataaaggcgttaattaaaccaccaattaaactactgacaaccaccaccacggcgacaatcattccccggcgattaaggacaatctgctttaaggtcatgccattattgcgcaactgaataccaacgaggaaaagtagcaaaattaacgtgtattcactggcttcggtcgcgtgttgtaagaaagccagtccacttagaccaatggcaaaaccaatcactactacgccgcacagttttaggctctccagcgccatcgcaatacggctcgggagtttttcttgctgatggtggttgcgccacggcaggcctcgctccagccacatcagggcggcaatattacacagtaaaataacggtaatactgacggcagaataatgcagaatcgccaacaggttactggcgaggttatcgagaaacgccagactgatacccataaaaaagagaataaggtaaaccatccagcttaatagctgattaataacttttaacgcagcttgttggcgaagcggaatgaggtaacccacaatcaggggaaccagaatgattaacagcccagaaaacatgaaaacccagtccttgcaaagatgaagtcgaaatgcgcgatgacacactactgaaagcggaaggacgagtaaagttgcaattaaaaggaaatgttatgcataaggagcagtagagtattcgttttcatttaaagatattcttgcgctttaattacaaactgcaccgatgttggtggcgtcaaaatcgccgaggcgttccctgaaggccggggcagcccacatggatgtgggctgagggcgcgttttacagggatgttacctcgcgcccgacccggtagccgtaagggataagtcgagggcaccgcgcagcggcgattttgttcgccagagcccgggggtgcagggggcggcggcgattggccgccccctgcgcgctccttgcgccagtggcaatatgttgcttagctcatgaaaggagcgcaacaagatgatgaatcaacatataacaacatcttaaaaaaaggcctgacattacgccaggccttctgcgttaattaatcacgcttttccagcagggtccggtaaatcagaccaccgataatgccgccgacaattggcaccacccagaagaaccacagttgttctaatgcccagccgccctggaagatagcaaccgcggtgctgcgcgccgggttaacagaagtgttagtcaccggaatactaattaagtgaatcagggttaaggccagaccaatagcgatcggcgcaaaacctgccggcgcgaatttgtcggttgcgccgtggatcaccaacaggaaacctgcactcaataccagttcaactaccagcgcggaaagcatggaataaccgcctggactatgctcgccataaccgttagaagcaaaaccgctggctgccgcgtcaaaacccgttttaccactggcaattaaatacagcagcgccgctgcaacaataccgccgacaacctgggcaattacgtagccaacgacttcttttgccggaaaacgtccgccagcccataaaccaatagtgaccgccgggttaaaatgaccaccagaaatatgaccaacagcaaaggccatcgtcagaacggtcagaccgaacgccaacgccacgccggcaaaaccaatgcctaattccgggaagcctgcggccagtacagcactaccacagccaccaaaaacaagccagaaagtaccaaaacattcagctgctaattttctgaacatatccaccacaattaaaaattgaccctgtgaaaaatatggtcgttttatagggtcgtcgtaaaaaagtgacgacggaaataatgcgcggctattttaaaaacgaaggcgagtcattcaccagataaataaatccagtaaatttgatttagggcaacagcgggttgccccatatagtcatttgtctgattgacagtgtagtgcacgcaaaagatttaatcctttaggcgtaataaaaaataatttatcatgctaattatttgattttgttgtttttgcagacttatcagcaagagggagtataacgcgattattcgctcatttttcagacatttgccatgcttaaatgtgatgtcatcacgtattagcaaggcctttcccgttatactgccagcgtaaaggataagtcacatatttctggaggggatatgattcttgagcgcgttgaaattgtgggttttcgcggtatcaaccgtttgagcttgatgctggaacaaaacaacgtcctgattggggagaacgcgtggggtaaatccagcttgctggacgccttaactctgctgctaagcccagaaagtgatctctaccattttgagcgcgacgatttctggttcccgccgggagatatcaacgggcgagaacatcatctgcatattattttgaccttccgcgaaagcctgccaggccgacatcgggttcgccgttatcggccgctggaagcgtgctggacgccatgcaccgatggctatcaccgtattttttatcgtctggaaggggagagtgcggaagacggcagcgtgatgacactgcgcagttttctcgataaagacggacatccgattgatgtcgaggatattaacgatcaggcacgccatctggtgcgtttaatgccggtgctgcgcttgcgtgatgcccgttttatgcgccgtattcgtaacggcacggtgccaaatgtccctaatgtggaagtcaccgcgcgccagctcgatttcctcgcccgtgagttatccagtcatccgcaaaatctctctgatgggcagattcgtcagggactttccgcaatggtacagctgcttgagcattatttctctgagcagggggccggacaggcgcgatatcgtttaatgcggcggcgagccagcaatgagcaacgaagctggcgctatctggatatcatcaaccggatgattgaccgacctggtgggcgcagctatcgggttattttgctcggcctatttgctactttgttgcaggcaaaaggcacattgcgactggataaagacgcccgtccattgttgctgatcgaagatccagaaacccgtttacaccccattatgcttagtgttgcctggcatctgttgaatcttctgccattgcagcgcattgccaccaccaacagcggtgagttgcttagcttaacgccggtagagcatgtttgccgactggtacgtgagtccagccgcgttgccgcctggcgtctggggccgagtggcttgagtaccgaagatagccgacgcatatcctttcacattcgttttaaccgtccgagtagcctgtttgcacgctgctggttgctggtggaaggggaaacggaaacctgggttatcaatgaactggcgcgtcagtgcggacatcattttgatgccgaagggatcaaggtcattgagtttgcccagtccgggctaaagccactggttaaatttgcccgccgaatggggattgaatggcatgtactggtcgatggcgatgaagcagggaagaaatatgccgctacggtacgcagcctgttgaataacgatcgggaagccgaacgagaacatttaacggcgttaccggcgctggatatggaacattttatgtatcgccagggattttccgatgtgttccaccgcatggcgcaaatcccggaaaatgtaccgatgaatctacgcaaaattatcagcaaagcgatccatcgctcttccaaacccgatcttgccattgaagtggcaatggaggcaggacgtcgtggtgtggactccgtaccgacgctgctgaaaaaaatgttcagtcgcgtgctgtggctggcgcgcggtcgcgcggattaaccgcgaaacatcgtggccatttgtggctgaatagcgtcgagcatctcatagcgccgacggtattcagcccgttttttactggcgatttcggcaatctcttttcgtgctatctgtgctggaaggcggtaatggcgttcagcatcacatacgccgccaacgctttcccagaaagcgttgtaatcagcgtggatcttgccttctttatcgcgataacgcaggctgcggtaaatatgcgtttcattgctgacggcaataatctgctctacctgcaaacgttgggcaaacagacaggccgcttccatcacgaggcgtttgggaaatagcccgtggcaggctttcgtcgcattctggatttcctgatgtggaatttcccattttgcgccttgcagtccgccaataaacatcgttcttttcccctgatattcacacagggtaaacgtgatctctgccagaggaataccttcgctgttgcggaacaggattgtgctgtcaccttctttatccatactgatcatcatggtcagctcaagcgtgaactgctcgccgtttttgccttccagcttcgccagttgcagcccgggggtattcaaatataagctgaattcttccgcgctcatacattcgcggagtaacgcataatggtaacgtaacgcctccagcaattgcttacggctaagattcgccgcaaggtaagggcgatgcagacgcacaggcagtcgcggctggcgcgttaacaatacattgagattaggccagtgggaaagttcgttcatccactcaacgcttaaacgcggcataatcaagctgcgcagcaaaaatttctggcgaaaactacggcgatgccagaatttacccggccgacactgtccacgtgccagactaagaaaaagactcaggctgctgagagattcagatggcgtaaaggtccgttcagttagctggctcatattcatgaaatcaatggttatacatggcgtgcttttcaccattgcgtatcttaaccaaacatcaatagtgtgattactaacgtaaattttagggttttgttgatatttcgttgaagttaatgacccggattggcatatggagtattcagaaaatttatgaaaaagcggaaaaccgtgaagaagcgttacgttattgcgctggtgatagtcatcgccggactgattacgttatggagaattcttaacgcacccgtgccgacttatcagacgctgattgtgcgccccggtgatttacagcaaagcgtgctggcgaccggaaagctggacgcgctgcgtaaggttgatgtgggcgcgcaggtcagcggtcagttgaaaactctgagcgtggcgattggcgataaagtaaaaaaagaccagcttttaggggttattgatcctgaacaggctgaaaaccagattaaggaggtcgaagcaacgctgatggagctacgtgcgcagcggcagcaggcggaagcggagctgaaactggcgcgggtgacgtattcccgtcagcaacgtctggcacaaacgaaggctgttagtcagcaggatctcgacaccgccgcgacggagatggctgtgaaacaggcgcaaattggcaccattgacgcgcaaatcaagcgcaatcaggcttctctcgatacggctaaaaccaatctcgattacactcgcatcgttgccccgatggccggggaagtcacgcaaatcaccactctgcaaggccagacggtgattgccgcacaacaagcaccgaacattctgacgctggcagatatgagcgccatgctggtaaaagcgcaggtttctgaagcggatgtaatccacctgaagccggggcaaaaagcctggtttacggtgcttggcgatccactgacgcgctacgaggggcaaatcaaggatgtactaccgacgccggaaaaggttaacgacgctattttctattacgcccgttttgaagtccccaaccccaatggtttgctgcggctggatatgactgcgcaagtgcatattcagctcaccgatgtgaaaaatgtgctgacgatccctctgagcgcgttaggcgatccggttggcgataatcgttataaagtcaaattgttgcgtaatggtgaaacacgcgagcgtgaagtgacgattggcgcacgtaacgataccgatgttgagattgtcaaagggcttgaagcgggcgatgaagtggtgattggtgaggccaaaccaggagctgcacaatgacgcctttgctcgaattaaaggatattcgtcgcagctatcctgccggtgatgagcaggttgaggtgctgaagggcatcagcctcgatatttatgcgggtgagatggtcgcgattgttggcgctagcggttccggtaaaagcaccctgatgaatattctcggctgtctggataaggccaccagcggcacctatcgcgtcgccggtcaggatgttgccacgctggacgccgatgcgctggcgcaactgcgccgcgagcatttcggctttattttccagcgttaccatttgcttagccatttaaccgccgagcagaacgttgaagtacccgccgtctatgctggtcttgagcggaaacagcgactgcttcgtgcccaggagttgctgcaacggctggggctggaagaccgtacagagtattatccggcacagcttagcggtggtcagcaacagcgcgtcagcatcgcgcgggcattgatgaacggtggtcaggtaattcttgccgatgaaccaaccggcgcactggacagccattctggcgaagaggtgatggcgatcctgcatcagctgcgcgatcgtgggcatacggtgattatcgtcacccacgatccgcaggtcgctgctcaggccgagcgggtgatcgaaattcgcgacggcgaaattgtgcgcaatcctcccgccattgaaaaagtgaatgttactggcgggacggaacctgttgtcaacacggtgtctggctggcggcagtttgtcagcggttttaacgaggcgctgacgatggcatggcgggcgctggcagcgaataaaatgcgtactttactgaccatgctggggattattatcggtattgcgagcgtggtttccattgtcgtggtgggtgacgccgccaaacaaatggtgctggcggatattcgttctattggtacgaatactattgatgtctatcccgggaaagattttggcgatgacgatccgcaatatcagcaggcgctgaagtacgacgacttaatcgccatccaaaaacaaccgtgggtcgccagtgccacacctgccgtcagccaaaacctgcgcctgcgttataacaatgttgatgttgctgccagtgccaatggcgtgagcggcgattattttaatgtctatggcatgaccttcagtgaaggaaacacctttaatcaggagcagctgaacggtcgtgcgcaggtcgtggttctcgacagtaatactcgccgccagcttttcccccataaagcagatgtggttggcgaggtgattctggtcggcaatatgcccgccagagtcattggtgtggcggaagaaaaacagagcatgtttggtagcagtaaagtgctgcgtgtctggctaccttacagcacgatgtccgggcgagttatgggccagagctggcttaactccattactgtcagggtgaaagaaggatttgacagcgccgaggcggaacagcaactcacgcgtttacttagtctgcgccacggaaagaaggatttctttacctggaacatggacggcgtcttgaaaactgttgaaaagaccacacgtactttacaactgtttctgacgctggtggcggtgattagcctggtggtgggcggtattggtgtaatgaatattatgctggtgagtgtgaccgagcggacgcgggaaattggcattcgcatggctgtaggtgcgcgagcaagcgatgttttgcaacagttcctgatcgaagccgtactggtttgcctggtcggtggcgcgttgggaataacactgagtctgttaattgctttcaccttgcagcttttcttacccggctgggagattggttttagtccgttggcgctgctgctggcgtttctctgcagcacggtcaccgggattttatttggctggttacccgcacgaaatgcggcacgactggatccagtagatgctctggcacgagagtaatttttgagataaaaatgccagccgatcgggctggcattttgcctttaggatgtacacaatgagacagaagagttatgcgactgccgcttctacttcgacgggcacaataacactggcgtgattgccttttggcccctggtggacatcaaactgaacggattgtccagcttttagcgttctgtaaccatccatctgaatggtggaataatgagcgaaaatatcttcgccgccgccttcagggcagatgaaaccaaaccctttggcattgttgaaccacttaacagtacccttttccatgcttcgacatccttcgcaaatcttatacaagtaagatggaataaaccggggtcagagagggggctgttcaaaacctcgccaactctagaaatacaatttagagaattagggcgagccgtcaagcatttgacaggggacaaggggcaggtatgaatcaaaaatttgaagcagttaacgctattgacaggaatgtgacagatgtcgctgatgccaacgatagatgatagttatctatcatgtggagtagattggtcaggcaaataagctcttgtcagcggcagggcgttctgccgataaccgtaaccgaagatgataactgacaatgggtaaaacgaacgactggctggactttgatcaactggcggaagaaaaagttcgcgacgcgctaaaaccgccatctatgtataaagtgatattagtcaatgatgattacactccgatggagtttgttattgacgtgttacaaaaattcttttcttatgatgtagaacgtgcaacgcaattgatgctcgctgttcactaccaggggaaggccatttgcggagtctttaccgccgaggttgcagaaaccaaagtggcgatggtgaacaagtacgcgagggagaatgagcatccattgctgtgtacgctagaaaaagcctgaatgcaggcataaaaattgggggaggtgcctatgctcaatcaagaactggaactcagtttaaatatggctttcgccagagcgcgcgagcaccgtcatgagtttatgaccgtcgagcacttgttactggcgctgctcagtaacccatctgcccgggaggcgctggaagcgtgttctgtggatttggttgcgctccgtcaggaactggaagcctttattgaacaaaccacacccgttctgcctgccagtgaagaggagcgcgacacacagccgacgctgagttttcagcgtgtactgcaacgtgcggtcttccatgtccagtcctccggtcgcaatgaggttaccggtgcaaacgttctggtcgctatctttagcgaacaggagagccaggcggcatatctgttgcgtaaacatgaagtcagccgtctcgatgtggtgaactttatctctcatggcacgcgtaaagacgagccgacacagtcttctgatcctggcagccagccaaacagcgaagaacaagctggtggggaggaacgtatggagaatttcacgacgaacctgaatcagcttgcgcgcgtgggcggaatcgacccactgattggtcgtgagaaggagctggagcgtgctattcaggttctctgccgtcgccgtaaaaacaacccgctgctggtgggggaatctggtgtcggtaaaaccgcgattgcggaaggtcttgcctggcgaattgttcagggcgatgtgccggaagtgatggctgactgtacgatttactctctcgatatcggttctctgttagcgggcacaaaatatcgcggcgactttgaaaaacgttttaaagcgttgctcaagcagctggagcaggacactaacagcatcctgtttattgatgagatccacaccattatcggtgcgggtgcagcgtctggtggtcaggtcgatgcggctaacctaatcaaaccgttgctctccagcggtaaaattcgtgtaattggtagcacaacctatcaggagttcagcaacattttcgagaaagaccgtgctctggcgcgtcgcttccagaaaattgatattactgaaccgagcatcgaagaaactgttcaaatcatcaatggcctgaaaccgaagtatgaagcgcaccacgacgtgcgttataccgcaaaagcggtgcgtgcggcggtagagctggcggtgaaatacattaacgatcgtcatctgccggataaagccattgatgttatcgacgaagcgggcgctcgcgcacgcctgatgccggtaagcaaacgcaagaaaaccgttaatgtggcggatattgagtccgtggtggcccgtattgcacgcattccagagaagagtgtttctcagagtgatcgtgataccctgaaaaacctcggcgatcgcttgaaaatgctggtcttcggtcaggataaagccattgaggcgctgactgaagccattaagatggcgcgtgcaggtttaggtcacgaacataaaccggttggtagcttcctgtttgccggccctaccggggtcgggaaaacagaggtgacggtacagcttagcaaagctttgggcattgagcttctgcgctttgatatgtccgagtatatggaacgccataccgtcagccgtcttattggtgcgcctccgggatacgttggttttgatcagggcggtttgctgactgatgcggtcatcaagcatccacatgcggtgctgctgctggacgaaatcgagaaagcgcacccggacgtgttcaatattctgttgcaggtgatggataacggtacgctgaccgataacaacggacgcaaagcagacttccgtaacgtggtgctggtgatgaccaccaacgccggggtacgggaaactgagcgcaaatccattggtcttatccaccaggataacagcaccgatgcgatggaagagatcaagaagatctttacaccggaattccgtaaccgtctcgacaacattatctggtttgatcatctgagtaccgacgtgatccatcaggtggtggataaattcatcgtcgagttgcaggttcagctggatcagaaaggtgtttctctggaagtgagccaggaagcgcgtaactggctggccgagaaaggttacgaccgggcaatgggcgctcgtccgatggcgcgtgtcatccaggacaacctgaaaaaaccgctcgccaacgaactgctgtttggtagcctggtggacggcggtcaggtcaccgtcgcgctggataaagagaaaaatgagctgacttacggattccagagtgcacaaaagcacaaggcggaagcagcgcattaatctgattgttaggtaggttggtcaagtccgtaatctcgaaagaggttacggactttttgtttatggggtggaggaggttcagaccctttttttaatgatgatggtaagttgttgataattagtgctgcgggaaggtaaggataaaaaagggtgctgcaggagaatgggatggttttgctttattaacaacgggctaaacgtgtagtatttgagttcactgccgtacaggcagcttagaaattcacaggtaacatactccacccgcccaccatgttcactgccgtacagacagataaaatgcgaaaaaaaagctcgcactttcgtacgagctcttctttaaatatggcggtgagggggggattcgaacccccgatacgttgccgtatacacactttccaggcgtgctccttcagccactcggacacctcaccaaattgttttgctaccaaacctcatgggtggcaacggggcgctactatagggagttggagtaaaacggtcaagaagaattttaatgataattattgtttgctcatactgtaaacaagttgtgcagtatatctacatcgagacaagttacggacttatacttccaaagtacttcatacatatcacaaaataaaaaggccggttaaaccgaccttttactcgttctttctcttcgcccatcaggcggtaaaacaatcagcgactacggaagacaatgcggcctttgctcaggtcgtacggggtcagttcaacagtcactttgtcgcccgtcaggatgcggatgtagtttttgcgcattttaccggagatgtgtgcagtaaccacgtgaccgttttctaactctacgcggaacatggtattaggcaacgtttcaagaacggtaccttgcatttcaatattgtcttctttggccatctaatcctctggggtatcactaccgtaatttgaaccggcaagataatgccgaagttctgtaaataagtaaagatttgcgcgctaaatcgcaacaaacaggttcggcacattactccgaaaacacacggctaagccgcaccaaaagcgcaacgtataagggagcggtgagataaacgatgggcgttacctgacgcgaaaaattccttatcggcagcggggtaatgagcgtaaccaactctgcgaccgcaattataacactctggggagaaatgtgccgaaaacattcattcttgtggactaaacaagcatcgtggtacccagaaattattcggcaatcgtccgaggcgcatttgattgagataattaaggtaatcccggcggggaatttcgcaggcaccaaggcttgctgtgtgatcgttaaggacctggcagtcgataagcttaccgccatgaccgataaattcctcacagaataccagaagcgccgttttagacgcattttccatccggctgaacatggactcgccacaaaatagcgttccctgggccacgccgtacataccgccgacaagctcatcttcacgccagacttcaatggagtgggcatggccgagttcgtgaaggcgatggtaggcttcgaccacgccacgcgtgatccaggttccttcttcgcgatcgctggcacagccttcaatgacctgaccaaaagcgtaattcatcgtgacacgataggggctgcgtttatgaaatcgcttcatactacggctgatatgcagactttctggccatagcaccgcgcggggatcggggctccaccagaggatggggtcgcctggagaaaaccacggaaaaataccacgctggtaagccattaacaggcgcgcagggctaagatcgcccccaagtgccagcaggccgttaggctcacgtaatgcgccttccggggaagggaaggctatactatggcgagaaagctgaaccaggcgcatgaccgcaaaactccacgcaagtcggatcgttcaataatagcttacaaaccctgcttgaactggtaataacgcccctgtctggcaagcagttctgcgtgagtaccttgctcaataatttgcccgttgtccatcactattatttgttggaaacgagagagtccgcgaagtcgatgggtgaccattaacaccgttttctcacgcatcatttctgcaagcaattcaaggatctggctttcggttgtggcatctaagccttcggtaggttcatccagcaacaccagtggcgcatcatgtaacagcgcacgggcgatagccagacggcgcagttcaccaccggagagctggcgtccgccttcacctaaccaactgttgagacctgcatcctcgagcagcttttccaggccaacgcgacgcaagatctcgctcagagcctcatcactactgccagggctggcgagtaaaagattatcacgcagcgtggcgctaaacagatgcactcgctgaggaacaacgctgatggtctgtcgtagagccgcttcattcaggctggctatggggctatcgttaagcaaaatctcgccctgttgcgggtcccatgcgcgggtcagctgttgtaacagtgtacttttgccgcatccggttcgcccgagaatcgctatatgttccccggcgtttacctgaagagaaatccctttaagtgcctgttgagattgctccggataagtgaactgaacatcccgtaacgtcaggctaacgcgatcggcaacacgagtttgggtatcaggaaaggtgacctccggtttttgatccgttaagtcagagatacgtacggcagaggcaatgacttgccccagatgctgaaatgcacccgttactggtgccagtgcttcaaacgcggctaacgcgcagaagacaaacagggcaattaacgcgccgggttgagcattgccgccaacgccgccagacgccatccacagcatcaggatcaccgctaacgcgccaatgagcagcattatcgcttggctcaatgcggtcagttcagattgacggcgttgcgcttccagccattgaatttctgtattctctagttgcgtgcgataacgatcgctggcaccaaaaatggtcagctcagcttgcccttgcagccaggccgtcagttgttggcgatactgtccgcgaagatgagtcagattttgcccggtgctttttcccgcacgataaaacagcggtggcatcaggaaaagcgtcagtaacataatgccgcccagcgtaaaggcgagggtgaaatcaaggaaacttaacccgattgtcaccaccataatcaccacaaaagcgcccaccagcgggctgataacgcgcaggtaaagatgatcgagcgtatcaacatccgccaccacgcgattgagcaattcgccctgacgatagcgcgccagtccggcaggggagaggggcagcaatttgctgaaggtgtaaatgcgcagatgctgcaacacgcggaaagtcgcgtcgtgacttaccagacgttcaaaatagcgcccggcagtacgggtgattgctgcgccacgcacgcccgcagcgggtagcatatagttgaagctgtacagtccggcaacccccgcaaccgcactggcgctgaggaaccagccggaaagtgtcaacagaccgatactggcgagcagcgtcacaattgccagcacaataccaagacttaacatccatttatgacgtttatacagtgccagatagggtagcaaagcgcgcatttaaatctcctcctgacgatgggccagtaatgtggcgaatgggccaccagccacacttaattccgcgtaacgtccttgctcaataatccggccatcctgcataacccaaatgacatcccagtcagcaagatcttctaactggtgggtgaccattaacgttgtctggcgcagagaggcggcattcagcgcctccattacgcgctgttcactgtgagcatcaaggctggcagcgggttcatccaacagtaataggctacagggatttagtaacgcacgggccaccgccacgcgctgcgcctgccccacggaaaggcgggcagcctggtcgccaacaggcgtatcaacgccttgtgggaggagcggtagaaactcgctgacccaggcgttatccagcgctgcttgtaattcttgttcgctggcatcaggtcgcgccagtagtacgttatcccgcaatgttgctgccggtaattgtgggttttgcccaacccaggagagatgtttacgccaactttctggacttaaatcgcgtaattctatcccgttgattcgtaggcttccctgataactgagaaaaccagaaagcgcgttcagcagactgcttttaccactaccgctgcgaccaaccaacaccgcacgttggcctgctggcaaagtaaagttcagcggtccggccagcgttttaccttccgggctcgtgataaacagctcctcggcctcaatggtcaccggatcggtgcttgctaattccgcctcaccacgttgcggatgggcgagcggggtttccataaacgttttcagactgtcagctgcgccaacagcctgggctttagcatgataaaacgtaccgagatcgcgtaatggctggaaaaactctggcgcaaggatcagggccagaaaacccgcagccagcgtcacaccggtatcgtagtgaccaaaatccagctcgccgagataggaaaaaccaaagtagaccgccaccagagcaatactcaggctggtaaaaaattcgagaatgccggaggataaaaacgccagccgtagcacttccattgtccgttggcggaaatcttcgctagcagaacgaatactttcaatttcagcttcaccacgaccaaaaatacgcaatgtttccatgccgcgcaggcgatcgaggaaatgcccacttaagcgagcaagagcgagaaagttacgtcggttagcatcggcagcccccattccaaccagcgccataaacaacggaattaacggtgcagtgcccagcagaatgagcgccgcagcccagttagaggggaagattgccaccacaatcagcaacggcacgctcactgccagcgccatttgcggcagatagcgtgcatagtaatcatgcatatcgtcaatttgctcgagtaccagcgtcgcccagctccccgcaggtttaccctgaatccacgctggccctgcttgttgcagacggtcgagaacctgacggcggatggcaaagcggatatgctgcccggcgtgataacccacccgttcgcgtaaccagaccacccatgcgcgcagtacaaaggtcagaaccagtaacgtaaagggaagcagcagggcttcacggggaatattctccataatcatatgttgcagaattcgcgccatgaaccaggcctgggcaatgatcaatatgccgctcacaaagcccagcagacgagaaatattcagccaacgttgggagatgacgctttgctgttttaaccagcgggttaactctttttgacgagatttattcattgcacgcttagcaggtgagttatcagaattatttgcagagcaatgttacaacggggaaaaaataaaggcgacccatagtcgcatggtgtcgccttctttacttttgttactgatttgtaaaattattttgcgtcagctaaaccatcgaggtagcgttccgcatcaagtgctgccatgcagcctgtaccggcgctagtaatggcctggcgataaatgtgatccatcacgtcgcctgcggcaaagacgccaggaatgctggtctgggtggcattaccatgaataccgctctgtactttgatgtagccgttttccagttccagctgcccttcgaaaatcgcagtattcgggctgtgaccgatagcaacaaacagaccggcaacgtcgagactctcgatgttatcgctgttttgcgtatcgcgcagacgaacgccagtgacacccatttgatcgccggtcacttcttccagcgtacggttggtgtgcagaatgatgttgccgttctccactttatccatcaggcgcttaatgaggattttttccgcgcggaaaccgtcacggcggtgaatcagatgcacttcgctagcgatgttagacagatacagcgcctcttcaaccgcggtattgccgccgccgatgaccgcaactttctggttgcgatagaagaaaccgtcgcaggttgcacaagcagaaaccccacggcctttaaaggcttcttcagagggcaggccgagatagcgtgcagaagctccggtggcaataatcagcgcgtcgcaagtgtattcgccgttatcgccattcagacggaacggacggttttgcagatccaccttgttgatatgatcaaaaatgatctcagtttcaaacttggtggcatgttcgtgcatgcgctccattaataacggaccggtcagatcgtttggatcgccaggccagttttccacttccgtggtggtggtcagttggccgcctttttccatgccggtaatcagcacaggttgcaggttggcgcgcgccgcgtagacagcagcggtgtatcccgccgggccactacccaggataagcagtttactgtgtttggtcgtgcccatgagatccccatagttgttggcagacaatgggcaggattgtagggaatttacagacgtaaaaaaagagtatgacgattttgttaacaatttgtgcaatcggcagcatcgataagcaggtcaaattctcccgtcattatcacctctgctacttaaatttcccgctttataagccgattaaatgatgaataaacgcccctgttaatgaatatctggcatgttgtactaaaaatcgatgttttgctttgacaatcccctggtgttttgcgaaaacattcgaggaagaaaaaaaacagtattcttatatgcgcataaccatgcatgtaaataccatgtttaccgtgctagtgaaatctacgtatggcgtggacagacgccattcgtgatgtcgatagctgccacaaggcaacggtcttctcaccgtagacccaggcattgcgcgccgtgaatcttcatgatttcggtctatcgtgacgggtagcgactctgaacagtgatgtttcagggtcagacaggagtagggaaggaatacagagagacaataataatggtagatagcaagaagcgccctggcaaagatctcgaccgtatcgatcgtaacattcttaatgagttgcaaaaggatgggcgtatttctaacgtcgagctttctaaacgtgtgggactttccccaacgccgtgccttgagcgtgtgcgtcggctggaaagacaagggtttattcagggctatacggcgctgcttaacccccattatctggatgcaagtcttctggtattcgttgagattactctgaatcgtggcgcaccggatgtgtttgaacaattcaataccgctgtacaaaaacttgaagaaattcaggagtgtcatttagtatccggtgatttcgactacctgttgaaaacacgcgtgccggatatgagtgcctaccgtaagttgctgggggaaaccctgctgcgtctgcctggcgtcaatgacacacggacatacgttgttatggaagaagtcaagcagagtaatcgtctggttattaagacgcgctaacacggaacaggtgcaaaatcggcgtattttgattacactcctgttaatccatacagcaacagtactggggtaacctggtactgttgtccgttttagcatcgggcaggaaaagcctgtaacctggagagcctttcttgagccaggaatacattgaagacaaagaagtcacattgacaaagttaagtagcggccgccgccttctggaggcgttgctgatccttattgtcctgtttgccgtctggttgatggctgccttactaagctttaaccctagcgaccccagctggagccaaacggcctggcatgaacctatccataatttaggtgggatgcccggtgcgtggttggcagatacgctgttctttatttttggcgtgatggcttacaccattcccgtcattattgtcggcggttgttggtttgcctggcgtcatcagtccagcgacgaatacattgattattttgccgttagcctacgcatcattggcgttttggcgctcatccttacctcctgtggtctggcggcaatcaacgctgacgatatctggtattttgcctccggtggcgtcattggcagcttactaagcactacgctacaaccactgctacacagtagcgggggaactattgcgctgctctgcgtttgggcagcgggcctgacgttgttcaccggttggagttgggtgaccattgctgaaaaactcggcggctggattttaaacattctcaccttcgccagtaatcgtacccgtcgcgatgatacctgggtcgatgaagatgagtatgaagacgacgaagagtatgaagatgaaaatcacggcaaacagcatgaaagtcgccgtgcccgtattcttcgcggcgcgctagcgcgtcgtaaacggttggcggaaaaattcattaatccgatggggcggcaaacagacgctgcgttgttctccggtaagcggatggatgatgacgaagagattacctacactgcacgcggtgtggctgccgacccggacgacgtcctatttagcggcaatcgtgcaacgcagccagaatatgacgaatacgatccattattaaacggtgcgccaattaccgaacctgtcgctgtagcagctgctgctaccacggcgacacaaagctgggctgcgccggttgaacctgtgactcagacgccgcctgttgcctctgttgatgttccacctgcgcaacctacagtagcctggcagcctgtaccgggtccacaaacgggagagccggttattgctcctgcaccggaaggttacccacagcagagtcaatatgcgcagcctgcagtgcaatataatgagccgctgcaacaaccagtacagccgcagcagccgtattatgcacctgcagctgaacaacctgcgcaacagccgtattatgcccctgcgccagaacaaccggtggcaggtaacgcctggcaagccgaagagcagcaatccacttttgctccacagtctacataccagactgagcaaacttatcagcagccagccgctcaggagccgttgtaccaacagccgcaacccgttgaacagcagcctgttgtggagcctgaacccgttgtagaagagacaaaacccgcgcgtccgccgctttactactttgaagaagttgaagagaagcgagcccgtgaacgtgaacaacttgcggcctggtatcaaccgattccagaaccggttaaagaaccagaaccgatcaaatctagcctgaaagcaccttctgttgcagcagtacctccagtagaagccgctgccgctgtttccccgctggcatctggcgtgaaaaaagcgacactggcgacgggggctgccgcaaccgttgccgcgccagtcttcagtctggcaaatagcggtggaccgcgtcctcaggtcaaagaggggattggtccgcagttgccacgaccgaaacgtatccgcgtgccaactcgtcgtgaactggcgtcttacggtattaagctgcccagtcagcgtgcggcggaagaaaaagcccgtgaagcccagcgcaatcagtacgattctggcgatcagtacaacgatgatgaaatcgatgcgatgcagcaggatgaactggcacgtcagttcgcccagacacagcagcaacgctatggcgaacagtatcaacatgatgtgcccgtaaacgcagaagatgcagatgctgcggcagaggctgaactggctcgtcagtttgcgcaaactcaacaacaacgttattccggcgaacaaccggctggggcgaatccgttcagcctggatgattttgaatttagcccaatgaaagcgttgctggatgatggtccacacgaaccgttgtttacgccaattgttgaacctgtacagcagccgcaacaaccggttgcaccgcagcagcaatatcagcagccgcaacaaccagttccgccgcagccgcagtatcagcagccacaacagccggttgcgccgcagccacaatatcagcagccgcaacaaccggttgcgccacagcagcaatatcagcagccgcaacaaccggttgcgccgcagcagcagtatcagcagccacaacagccagttgcgccacaaccgcaggataccctgcttcatccgctgttgatgcgtaatggcgacagccgtccgttgcataaaccgacgacgccgctgccttctctggatttgctgacaccgccgccgagcgaagtggagccggtagatacctttgcgcttgaacaaatggctcgcctggtggaagcgcgtctggctgatttccgtattaaagccgatgtcgtcaattactctccggggccggttatcactcgctttgaattgaacctggcaccgggcgtaaaagcggcgcgcatttctaacttgagtcgggaccttgcccgtagtcttagcacggtggcggtgcgtgtcgttgaagttattcctggcaaaccctatgtaggtctggagttaccgaataaaaaacgacaaaccgtttatctgcgcgaagttttggataacgccaaattccgcgataatccgagcccattaaccgtggtgctgggtaaagatatcgccggtgagccggtggttgccgatctggcgaaaatgccgcacttgttggttgcggggactaccggttccggtaaatctgtcggtgtgaacgcgatgatcctgagcatgctttataaagcacagccagaagatgtgcgtttcatcatgatcgacccgaaaatgctggagcttagcgtttatgaaggcattccgcatctgttaacggaagtcgttactgatatgaaagatgccgccaacgcgctgcgctggtgtgttaacgagatggagcgtcggtataaactgatgtctgcgctgggtgtgcgtaatctggcgggttataacgaaaaaattgctgaagccgatcgcatgatgcgtccgattccagacccgtactggaagccgggtgacagtatggatgcccagcatccggtgctgaaaaaagaaccatacattgtggtgttggttgacgaatttgccgacctgatgatgacggtaggtaaaaaagtggaagagctgatagcacgtctggcgcaaaaagcccgtgccgcgggtatccacctcgtactggcaactcagcgtccaagcgttgatgttattactggtctgattaaagcgaatattccgacccgtatcgcctttaccgtatccagtaagattgacagtcgtaccattcttgatcaggctggcgcggaaagtctgctgggtatgggggatatgctctactctgggccgaactccacgttgccggtacgtgtccatggtgcttttgttcgcgatcaggaagttcatgccgtggtgcaggactggaaagcgcgtggtcgcccacagtatgttgatggcatcacctccgacagcgaaagcgaaggtggtgcgggtggtttcgatggcgctgaagaactggatccgttgttcgatcaggcggtgcagtttgtcactgaaaaacgcaaagcgagtatttctggcgtacagcgtcagttccgcattggttataaccgtgcagcgcgtattatcgaacagatggaagcgcaggggattgtcagcgaacaggggcacaacggtaatcgtgaagtgctggccccaccgccgtttgactaactaatgcatcgtatgccggataaggcgcggtagcgtcgcatccggcactctatcaactgaaaattcagtattttcttctttcctcaagctgattattagcctggaatagagagtagagggaactcccgatcgggagtgacgtaatttgaggaataatgatgaaaaaaattgccatcacctgtgcattactcagtagcttagtagcaagcagcgtttgggctgatgccgcaagcgatctgaaaagccgcctggataaagtcagcagcttccacgccagcttcacacaaaaagtgactgacggtagcggcgcggcggtgcaggaaggtcagggcgatctgtgggtgaaacgtccaaacttattcaactggcatatgacacaacctgatgaaagcattctggtttctgacggtaaaacactgtggttctataacccgttcgttgagcaagctacggcaacctggctgaaagatgccaccggtaatacgccgtttatgctgattgcccgcaaccagtccagcgactggcagcagtacaatatcaaacagaatggcgatgactttgtcctgacgccgaaagccagcaatggcaatctgaagcagttcaccattaacgtgggacgtgatggcacaatccatcagtttagcgcggtggagcaggacgatcagcgcagcagttatcaactgaaatcccagcaaaatggggctgtggatgcagcgaaatttaccttcaccccgccgcaaggcgtcacggtagatgatcaacgtaagtaaaggcacctgagtgagcaatctgagcctcgattttagcgataatacttttcaacctctggccgcgcgtatgcggccagaaaatttagcacagtatatcggccagcaacatttgctggctgcggggaagccgttgccgcgcgctatcgaagccgggcatttacattctatgatcctctgggggccgccgggtaccggcaaaacaactctcgctgaagtgattgcccgctatgcgaacgctgatgtggaacgtatttctgccgtcacctctggcgtgaaagagattcgcgaggcgatcgagcgcgcccggcaaaaccgcaatgcaggtcgccgcactattctttttgttgacgaagttcaccgtttcaacaaaagccagcaggatgcatttctgccacatattgaagacggcaccatcacttttattggcgcaaccactgaaaacccgagctttgagcttaatagcgcactgctttcccgtgcccgtgtctatctgttgaaatccctgagtacagaggatattgagcaagtactaactcaggcgatggaagacaaaacccgtggctatggtggtcaggatattgttctgccagatgaaacacgacgcgccattgctgaactggtgaatggcgacgcgcgccgggcgttaaatacgctggaaatgatggcggatatggccgaagtcgatgatagcggtaagcgggtcctgaagcctgaattactgaccgaaatcgccggtgaacgtagcgcccgctttgataacaaaggcgatcgcttttacgatctgatttccgcactgcataagagcgtacgtggtagcgcacccgatgcggcgctgtactggtatgcgcgaattattaccgctggtggcgatccgttatatgtcgcgcgtcgctgtctggcgattgcgtctgaagacgtcggtaatgccgatccacgggcgatgcaggtggcaattgcggcctgggattgctttactcgcgttggcccggcggaaggtgaacgcgccattgctcaggcgattgtttacctggcctgcgcgccaaaaagcaacgctgtctacactgcgtttaaagccgcgctggccgatgctcgcgaacgcccggattatgacgtgccggttcatttgcgtaatgcgccgacgaaattaatgaaggaaatgggctacgggcaggaatatcgttacgctcatgatgaagcaaacgcttatgctgccggtgaggtttacttcccgccggaaatagcacaaacacgctattatttcccgacaaacaggggccttgaaggcaagattggcgaaaagctcgcctggctggctgaacaggatcaaaatagccccataaaacgctaccgttaatgttatcgttgcggtaatgttgttactgtatccctgtggtcgcaggctgtggccacatctcccatttaattcgataagcacaggataagcatgctcgatcccaatctgctgcgtaatgagccagacgcagtcgctgaaaaactggcacgccggggctttaagctggatgtagataagctgggcgctcttgaagagcgtcgtaaagtattgcaggtcaaaacggaaaacctgcaagcggagcgtaactcccgaagcaaatccattggccaggcgaaagcgcgcggggaagatatcgagcctttacgtctggaagtgaacaaactgggcgaagagctggatgcagcaaaagccgagctggatgctttacaggctgaaattcgcgatatcgcgctgaccatccctaacctgcctgcagatgaagtgccggtaggtaaagacgaaaatgacaacgttgaagtcagccgctggggtaccccgcgtgagtttgactttgaagttcgtgaccacgtgacgctgggtgaaatgcactctggcctcgactttgcagctgcagttaagctgactggttcccgctttgtggtaatgaaagggcagattgctcgcatgcaccgcgcactgagccagtttatgctggatctgcataccgaacagcatggctacagtgagaactatgttccgtacctggttaaccaggacacgctgtacggtacgggtcaactgccgaaatttgctggcgatctgttccatactcgtccgctggaagaagaagcagacaccagtaactatgcgctgatcccaacggcagaagttccgctgactaacctggtgcgcggtgaaatcatcgatgaagatgatctgccaattaagatgaccgcccacaccccatgcttccgttctgaagccggtagttatggtcgtgacacccgtggtctgatccgtatgcaccagttcgacaaagttgaaatggtgcagatcgtgcgcccagaagacagtatggcggcgctggaagagatgactggtcatgcagaaaaagtcctgcagttgctgggcctgccgtaccgtaaaatcatcctttgcactggcgacatgggctttggcgcttgcaaaacttacgacctggaagtatggatcccggcacagaacacctaccgtgagatctcttcctgctccaacgtttgggatttccaggcacgtcgtatgcaggcacgttgccgcagcaagagcgacaagaaaacccgtctggttcataccctgaacggttctggtctggctgttggtcgtacgctggttgcagtaatggaaaactatcagcaggctgatggtcgtattgaagtaccagaagttctgcgtccgtatatgaacggactggaatatattggctaatacccaatttttctgaatctaaaaagcgcctgcgggcgctttttttgtctccctttgataccgaacaataattactcctcacttacacgtaatactactttcgagtgaaaatctacctatctctttgattttcaaattattcgatgtatacaagcctatatagcgaactgctatagaaataattacacaatacggtttgttactggaatcaatcgtgagcaagcttgagtgagccattatgaaaacgaaaatccctgatgcggtattggctgctgaggtgagtcgccgtggtttggtaaaaacgacagcgatcggcggcctggcaatggccagcagcgcattaacattaccttttagtcggattgcgcacgctgtcgatagcgccattccaacaaaaagtgacgaaaaggttatctggagcgcctgtacagttaactgtggtagtcgctgcccgctacgtatgcacgtcgtggacggtgaaatcaaatatgtcgaaacggacaataccggcgatgacaattacgacggcctgcaccaggttcgcgcctgcctgcgtgggcgttccatgcgtcgccgtgtctacaatccggaccgcctgaaatatccgatgaaacgagtcggggcgcgcggtgaaggcaaattcgagcgcattagctgggaagaagcctacgacatcatcgcgaccaatatgcagcgcctgatcaaagagtacggcaacgagtctatctatctgaactatggcaccggtacgctgggcggcaccatgacccgctcctggccgccgggaaataccctggtcgcgcggctgatgaactgctgcggcggctatctgaaccattacggcgactactcctccgcgcaaattgcggaaggtttgaactatacctacggcggctgggcagatggcaacagcccgagcgatatcgaaaacagtaagctggtagtgctgtttggtaataaccctggcgaaacgcgaatgagtggcggtggggtgacttactatcttgaacaggcacgccagaaatctaatgcccgcatgatcatcatcgatccgcgctataccgacaccggtgccgggcgcgaagatgagtggatccctattcgtccgggaacagatgccgcactggttaacggtctggcgtacgtcatgatcactgaaaacctggtggatcaggcattcctcgataaatattgcgttggctacgatgagaaaaccctgccagccagtgcgccgaaaaatggccactataaagcttatattctgggtgaagggccagatggcgtggctaaaacgccggaatgggccagccaaatcactggtgttccggcagacaaaatcatcaaattggctcgtgaaatcggtagtaccaaaccggcgtttatcagccagggatggggcccgcagcgtcacgctaacggtgaaatcgcaacccgtgctatcagcatgctggcgattctgaccggtaacgttggtattaacggaggcaacagcggcgcgcgtgaaggtagttacagcttaccgtttgtccgtatgccgaccttggaaaacccgatccagaccagcattagcatgtttatgtggaccgatgccattgaacgtggcccggaaatgacggcgctgcgtgatggtgtacgcgggaaagataagctggatgtgccgatcaaaatgatctggaactatgccggtaactgcctgattaaccagcattctgaaatcaaccgtacccatgaaatccttcaggatgataagaagtgcgagctgattgtggttatcgactgccacatgaccagtagcgcgaaatatgctgacatcctgctgcctgactgcaccgcttccgaacagatggactttgcgctggatgcatcctgcgggaatatgtcttacgtgattttcaacgatcaggtgattaaaccgcgctttgaatgtaagaccatctatgaaatgaccagcgaactggcaaaacgtcttggcgttgagcaacagtttactgaaggccgtacccaggaagagtggatgcggcatctgtatgcccagagccgggaagcgattcctgaactgccaacgtttgaagagttccgcaagcaggggatctttaaaaagcgcgacccacaagggcatcacgttgcttataaagccttccgtgaagatccgcaggcaaacccactgactacgccaagcggcaaaattgagatttatagccaggcgctggctgacattgccgctacctgggaattgcctgaaggcgatgtgatcgatccactgccgatctacacgccgggctttgaaagttatcaggatccgctgaacaaacagtatccgctgcagcttacaggtttccactataaatctcgcgttcacagtacttacggcaacgttgatgtgctgaaagcggcttgccgtcaggaaatgtggatcaacccgcttgatgcccaaaaacgcggtatccacaacggcgataaagtcaggatctttaacgatcgtggtgaggttcatattgaggcgaaagtgacgccacgaatgatgccgggtgtggtcgcactgggtgaaggtgcctggtatgacccggatgcaaaacgtgtcgataagggtggttgtattaacgtactgaccactcaacgtccgtctcctctcgctaaggggaatccgagtcatacaaaccttgttcaggttgaaaaggtgtaaggagtaaccgatgacaacccagtatggattttttattgattccagccgttgcaccggttgcaaaacctgcgagctggcctgtaaagactacaaagatttgacgccagaagtcagcttccgccgcatttatgaatatgctggcggcgactggcaggaagataacggtgtctggcaccagaacgtgtttgcctactatctgagcattagttgtaaccactgcgaagatccggcttgtactaaagtctgcccgagcggtgcgatgcataaacgtgaagatggttttgttgtggtcgatgaagatgtgtgcattggctgccgctactgccatatggcttgcccgtatggcgcaccgcaatataacgaaacgaaaggccatatgaccaaatgcgatggttgttatgaccgtgttgcggagggtaaaaagccgatctgtgttgaatcttgtccgctgcgggcgctggatttcggccctatcgacgagctgcgtaaaaaacatggcgatctggcggccgttgcgccgttgccgcgagctcactttaccaaaccgaatattgtgatcaaacccaatgccaatagccgcccgaccggggataccactggctatctggcaaacccgaaggaggtgtgagatgggaagtggatggcatgaatggccgctgatgatcttcacggtcttcgggcaatgtgtagcaggtggttttatcgttctggctttggcgctgctcaaaggcgacctgcgagcagaagcccagcagcgtgttatcgcctgcatgtttggtttatgggtgctgatgggcattggctttatcgcctctatgctccatcttggtagtccaatgcgcgcttttaacagcctcaaccgggtaggggctagtgcactcagtaacgaaatcgccagcggtagcatcttttttgccgtaggcggcatcggctggttgctggcaatgctgaaaaagctgagtccggcattgcgtacgctgtggctgatagtgacgatggttcttggcgtcatctttgtctggatgatggtgcgtgtgtataacagcattgataccgttccgacctggtacagcatctggacgccgatgggcttcttcctgacgatgtttatgggcggcccgttactgggttacctgttgttgagtctggctggcgtcgatggctgggcgatgcgtctgctgccagcaatttctgtactggcactggtagtgagtggcgtggtgagtgtgatgcagggcgcagagctggcgactattcatagttctgtgcagcaggccgcagcgctggtgccggactatggtgcgctgatgtcctggcggatcgtgcttttggccgttgccctgtgcttgtggattgcaccacagctaaaaggttatcagcctgcggttccgctactttctgtaagtttcattctgcttctggcaggggaattaatcggtcgcggcgtattctatggtttgcatatgaccgtggggatggccgtcgcaagctaatcataacaaccggggtttcggccccggttctcttttatttctgcttcgttaacgtgtcataactggtcatcaaattacgataatcaggaatgtggttagagaacaacgtcgccagtccttcaatatcattacgccagtcgcgatgcagctcgcacgccacgccgaaccatgtcatcaattgcgcaccagcttggctcaagcgatcccatgcgctatgccgggtaatttcattaaaggtcccactcgcgtcagtcacgacaaagacgtcaaacccttcttcaatggcactaagcgccgggaatgccacgcaaacttcggttaccacaccggcaataattaactgttttttacctgtcgctttgacagcttttacaaaatcttcgttatcccaggcgttaatatttcccgggcgagcaatgtaaggtgtatcggggaattgtgctttcagttctggaactaatgggccgttaggaccggtttcaaaactggtggtaagaatagttggtaagttgaaatacttagccaggtcacccagcgccagcacgttatttttaaacttatcgggttcgatatcccgtacaagggaaagtaaaccagcctggtgatcaacaagcaaaacggcagcatcatttttatcaagacgaacatacggtttggtcatcctcttctcctttcgagagtcagtggtacgtctgaaatcgatcagacgcgatgcattgctctgaaagcatagacgggaaatatgagtttgctgtgaccatgaaatttttcgactgaacgaagcgtatgaaatttgtgttagttcaataaaaacaatcagatgagactaatcatctcttcagcattagcgttatgaatgagtaatataaatcgataataccgccgctgggatatcgcgtattttcacccattgacaatgtttttggcggtggcatgatgcgcatgaaatttgaacttcctcacggttttaattcatgtccacgtatacccagcctgtcatgcttttgctgtctggcctgcttttgttgactctggcgattgcggtgttaaatacactcgtgccgctttggctcgcccaggaacacatgtccacatggcaggtaggcgttgtcagcagttcctattttaccggcaaccttgtcggtacattgctgacagggtatgtcattaagcgcattggctttaaccgcagctattatctggcctccttcatttttgccgctggctgtgccggccttggcctgatgattggattctggagctggttggcttggcgttttgtcgcgggcgtcggctgtgccatgatttgggtggttgttgagagcgcgctgatgtgcagtgggacgagtcgtaaccgtgggcgtttgcttgctgcgtatatgatggtttattacgtgggaacgtttttaggccagttactggtcagcaaagttagtaccgagctgatgtccgtattgccgtgggttacaggtttgacgttggcagggatcttaccgctgttgtttacgcgtgtgctgaatcagcaggctgaaaaccatgatagcacgagtattacgagtatgctaaaactccgtcaggcgcggcttggcgtgaatggctgcattatcagtggaatcgttctgggatctctatatggcctgatgccgctgtacctcaatcacaaaggggtgagcaatgccagcattggtttctggatggcggtactggtcagtgcgggtatccttggacaatggccgattggacgtctggcggataagtttggtcgactgctggtgttgcgtgttcaggtctttgtcgtcattctcggcagtatcgcgatgcttagccaggcggcgatggccccagcgttattcatcctcggtgccgctggctttacgctatatccggtggcgatggcatgggcttgcgagaaagttgaacatcatcaactggtggcgatgaaccaggccttactgttgagctatactgtgggaagtctgcttggcccgagttttaccgctatgctaatgcagaatttctccgataatttattgtttatcatgatcgccagcgtaagctttatctatttgctgatgctgctgcgcaacgccggtcatacgccgaaacccgttgctcacgtgtaaatgaattcaagcagagtgtgaacttactgtttcacactctgcttttttgtttcttctatctgacttgctttattccaaattttattcgtttaaaaataaaatgtgcagcaggttataattttgcatttcgctatttccgcacttcttatttgccgcgcataatccctcgttttaccgatgcccctttaattttggcgaaggatttgtctatggctgggaatgttcaggaaaaacagttgcgatggtacaacattgcgctgatgtcttttatcactgtctggggttttggcaacgttgttaataactatgccaaccaggggctggtggttgtttttagttgggtgtttatctttgcactctatttcacaccttatgcgctaattgttggtcagttaggcagcaccttcaaagatgggaagggcggggtcagtacctggattaaacacacgatgggacccggactggcttatctcgccgcgtggacctactgggtggtgcatattccctatctggcacaaaaaccccaggcaattctgattgcgctcggttgggcgatgaaaggcgacggtagcctaatcaaagaatatagtgtcgtagcgttacaggggttaacgctggtgctgtttatcttctttatgtgggttgctagtcgcggtatgaaaagcctgaaaatcgtcggttctgtggcagggattgctatgtttgttatgagtctcctgtatgtggcgatggcggtaaccgcgcctgcaattactgaagtgcatattgcgaccacaaacattacctgggaaacgttcattcctcatatcgactttacctacattaccactattagtatgctggttttcgcggttggcggagcagagaagatttctccttacgttaatcaaacgcgcaacccaggaaaagaatttccaaaagggatgttatgcctggcggtgatggttgcggtttgtgccattctgggcagcctggcgatggggatgatgtttgatagccgtaatatcccggatgacttaatgaccaacggtcagtattacgcctttcagaagctgggcgagtattacaacatgggtaatactttaatggtgatttacgccattgcgaataccctgggacaagtagcggcgctggtattcagcattgatgccccgcttaaagtgctattaggtgatgctgacagcaaatatattccagccagtttatgtcgtaccaacgcttctggtacgcccgttaatggctattttctgaccctggtactggtggcgattctgattatgctgccgactctcggcattggtgatatgaacaatctctataaatggctgttgaaccttaatagcgtagtgatgccgctgcgttatttatgggtatttgttgcatttattgcagtcgttcgcttggcgcagaaatataaaccagaatatgtctttattcgtaataagcctctggcaatgaccgtcgggatttggtgttttgcctttaccgcctttgcctgtttgacggggatcttcccgaaaatggaagccttcactgcagagtggaccttccagttggcgctgaatgttgcaacgccgtttgtgctggtaggattaggactgatattcccgctgctggcgcgtaaagcgaatagtaaataattattgtggtcggtgacgctgactctggcagatctgacccgtttttacataatcgagaaatgcgcgcaagccgcaggacatatactggcggtttggataatagatctggaagcctggacgctctgtgctccagtcttccagtacacattctaaacgaccagtatcaaggtactccttgatctgttcatagagcagatacccgataccagcacccatcaaaacggcctccagttcagcatcaacatcatccagaatgatatttcctgcgacagcaatttccagctcctttgcaaattgccagtggaaaggtttgccgctgggataacgaaaaacaacacattgatgattaagcagatcatgaggatggcggggtttgccatatcttgcaaagtactctggcgttgctgctacacataatttcactggcgggccgatcgccacgctgatcatatctttttcgacgatgcaactaagtcgaacgccagcgtcaaagccctgttggacgatatcgacaagagagtcgtcagttgtgagctcgactttaatatcaggatattcacgtgtgaaaccaaccagtaaagacattaaaaatatacgtgcagctacccgggcggcattgattttgagcgttcctgtcggtgtcagacgaaaatcattcatctcatctaacatgatctgaatttcgtcgaaagctgggcgcaatcgttcatagagattagaacccgcttccgttaagcttacgcttcgggttgtccgattgaataagcgaattttaagacgttgttccagtgttttaatactatggctaatggcggagctggataagcctaactcatcgcccgctgcacgaaagctttgattacgggccacggcaaagaaagtggcaaagtcagacatattcatccgcattagtgaaaatccttcattaactcatcctgaatcatcacgtttacaggattatgccgcctgcgtaaagtgcgctccagaacttaacgtggaggtaaaattatgcagtctgaacgtatttatttggtatgggcccatcctcgtcatgatagtttgaccgcacatattgctgatgcgatccatcagcgggcaatggagcggaaaatacaggtgacggaactcgatttatatcggcgtaatttcaacccagtgatgacgccggaagatgaaccagactggaagaatatggataaacgttattctccagaggttcatcagctttatagtgagctgcttgaacatgacacgttagtggtggtttttcctctctggtggtacagcttcccggcaatgctaaaaggatatattgacagagtatggaataatgggctggcttatggagatgggcacaaattaccattcaataaagttcgttgggtggcgctggttggaggagacaaagaaagttttgtccagatgggctgggaaaaaaatataagcgattatttaaaaaatatgtgcagttatcttggtattgaagatgccgatgtcactttcttgtgtaatacagtggtattcgatggggaagaacttcacgcgagctattatcagagcttattatctcaggtacgggatatggtagatgcactataagatgtgttaaaaacgctgtagcagaatgaagcgcggaataaaaaagcggcaactcaataaagttgccgctttacggggaaattagaacattaccttatgaccgtactgctcaagaatgcctttcacgcgttccatggtctctttcttcggtggtttaacaccgtcgagtttgtactcttcacccattgccacccatttgtgtttgcccagctcgtggtaggggagaagctcgattttctcaacgttgcccatatcacgggtaaattcaccgaggcgatgcgcactatcgtcatcgtcagaccagcctgggacaacaacgtagcggatccacaccttcacatttttgttcgccagatatttagcgaactccagcgtgcggtggttggaaactccaaccagattttggtggatctcgtcgttcatctgtttgagatcgagcattaccaggtcggttacttccagcagttcatcaatcaccggatcgtaacgacgaacaaaaccgttggtgtccagacaggtatgaatgccttcttttttgcaggcgcggaaccagtcacgaacaaactcagcttgcaggattgcttcaccgccggatgcggtaacgccgccgccggaagcgttcataaagtggcgataggtcaccacttccttcatcaaatcttcaacggtaacttctttaccgccatgcgtgtcccaggtgtcgcggttatgacaatacaggcagcgcatcaggcagccctggaaaaaggtgataaagcgaatacctgggccgtctacggttccacaggattcaaaggagtgaatgcgaccaataacactcattgcggtgtttctccagatgtggcccatctgaggccgtgttggtgcgcagctcgaaggctacgtcgagtctgttttggcagtcaccttaaagtatagatagctgacaaaaaaggctctcgcgctaaaaaaggccccactttcgtggagcctttattgtacgctttttactgtacgatttcagtcaaatctaattacatagattgagtgaaggtacgagtaataacgtcctgctgctgttctttagtcaggctgttgaaacgtactgcgtagccagatacacggatggtcagctgcggatatttttccgggttttccatcgcgtcgagcagcatttcacggttcatcacgttaacgttcaggtgctgaccaccttcgatggatgcttcgtggtggaagtaaccatccatcagaccagccaggttggtcttacgaacttcgtcgtctttacccagtgcgttcggaacgatagagaaggtgtaggagataccatctttagcgtaagcaaacggcagtttagcaacggaagtcagagaggctactgcacctttctggtcacgaccgtgcatcgggttagcacccggtccgaacggcgcgccagcacgacgaccgtctggggtgttacccgttttcttaccatacacaacgttagaagtgatggtcagaacagactgagtcgggatagcgtcacggtaggtgtgcagtttctgaattttcttcatgaaacgttctaccaggtcaacagccaggtcatctacacgcggatcattgttaccaaactgcgggtattcgccttcgatttcgaagtcgatagccagaccgtcttcgtcacgaatcggtttaactttcgcatatttgattgcagacagggagtcagcagcaacggacagaccagcgataccacacgccatggtgcggataacgtcacggtcgtgcagcgccatcagagaggcttcgtagctgtacttgtcgtgcatgtagtggatgatgttcagtgcagtgatgtactgtttagccagccagtccatgaagtgatccatgcgctccatcacttcatcatagttcaggacatcgcctttgatcggttcagacttcggaccaacctgcattttcagtttttcgtcaacgccgccgttgattgcgtacagcatggttttcgccaggtttgcacgcgcaccgaagaactgcatttgtttaccaacgatcatcgggcttacgcagcaagcaatagcgtagtcatcgttgttgaagtccggacgcatcaggtcatcgttctcatactgcagagaagaggtgtcgatggacactttagcggcgaatttcttgaagttcagcggcagtttttcagaccacagaatggtcatgttcggttccggagacggacccatggtgtacagggtgttcaggaaacggaagctgtttttggtaaccagggtacgaccgtcgaggcccataccaccgatagattcggttgcccagatcgggtcgccagagaacagttcatcgtattccggagtacgcaggaagcgaaccatacgcagtttcatgaccaggtggtcaaccatttcctgcgcttcttgttcggtgatcttgccagctttcaggtcacgttcgatgtacacatccaggaaggtggaggtacgaccgaaggacattgcagcaccgttctgagacttaacagcagccaggtagccgaagtaagtccactggatagcttcctgagcgttggtagccggaccagagatgtcgtagccgtatttcgcagccatttctttcatctgacccagagcgcggtgctgttcagcgatttcttcgcgcagacggatagtctgttccaggtttacgccgttttccagatcagcctgcagagaagtgaactgtgccagtttgtctttcatcaggtagtcgataccgtacagcgcaacgcgacggtagtcaccgatgatacggccacggccatatgcatctggcagaccggtcagaacaccagatttacggcaacgcaggatgtccggagtgtaaacgtcgaacacgccctggttgtgagttttacggtattcagtgaagatttttttgatcatcggatccagttcgcggttgtacgctttgcaggaaccttcgatcattttgataccaccgaacgggataagagcacgtttcagcggagcttcagtctgcagaccaacgattttctcaagctgcttgttgatgtagccagcgtcgtgagaggtgatggtggaagcaacagcggtgtcaaagtcaactggcgcgtgagtgcggttttccagtttaacgccttccattactttgtcccacagggtggtggtcgcttcagtagcgccagccaggaaggactcgtcaccctcgtacggagtgtagtttttctgaatgaagtcacggacgtttacttcattctgccagtcacctttggtaaaaccttcccaggctgtggctaacttttcattaagctcggacatgtaacacctaccttcttaagtggattttttatttactgcgtacttcgacaaccattaatggtggtcgttttcacgcaggtaaatgacccagtatgtcaacccaaccaacaaaccaccaccgataatgttgccgatcgtaaccggaatcaggttatcagtgatgaaattcatcacggtcaggtgagaaaaattttccggtgcagaaccgactgcggtccaaaattccggggatgcgaagtcgcggattacaatacccatcgggatcataaacatgtttgcgatactgtgctcaaaaccgctggcaacaaacatcgcgaccggcagcaccataatgaacgctttgtccatcaggctgcggccagaataactcatccatactgccagacataccatcaggtttgccaggataccaagacagacggcctcaataaaagtatggtgcactttgtggtcggcggtttgtaggacgtttagtccccattgaccatttgcggtcatatactcgccggaaagccacattaaaagtacaaacagcagtgcgccgaccaggttgccaaaatagacatttagccagtttttcgccaactgaccccaggtgatgcgcccactcgccttagcaacaacaatcaacacggtggaagtaaagagatcggctccgcagacaacacaaagaatcagccccagagagaagcaaatgccgccaaccagttttgccatgccgaagggcattgtgcctgtgccagtggttgctgtgatatagaagacgaatgcgatactgatgaaaacaccggcggtaatcgccagatagaaagtcttaagcggatgtttcgttgctttatagacacccgcctcttcggccactttggccattgcagcaggaagtaaaagatcaaaagggttgtcagctttcacactaactctctctttattaagtcggcgacgagatactaacaaagcattatagatgagaaattgatatagatcatatctcgcctggcttataggcccgtaactcgcatggtttttatgcaaatacggagtaaatatttgattatccaaataaaaataaattttaaaaattaacaaatgagttgaattttttccgcatcctccgctaaaacagttaattaaaagggagcatcaggcgaataaagtaacaatatcgatcgtatttattaaatacaaattaccgatatttaaccttataattacaattattttattaatgcaaatatatgtaaagcggggcattaaaaaaacgccccgtaatataactcagactaatcattaagcctacattgcgtaggctatttgattttattttgcccagaatgctgctttggcgcgctgcagcttttcgtaggccttcaacaagctctgatgtgcagcaaacgcgtgcagatcgctatctaccggttgcaggccgtaaaacgccgcttcgccgctcattgccgcactggcggcttctacggcatctgcgccgtacatgcgaacaaacgcattcagatattgcagcggctggcgatcttcttcctgtgccagtaataacaacgtttgcaggcagcgataatagttggcgcgttccggactaaatacactactgttaaactccatcgtccattcggtccagaccagagcctgttccagatcgccaccagccagcgccagcatggcttttaattcaccgatacgcagggtgtaccaaccgttatcgctcccggtcgccagacccaacagctcacgcacgcgggtaaagtcatcaaaaccttcttcatccagttgctcgatgaggttcaggtaatcttctttttcccactcgctgcctggtaggctaagaatcgtttcacgtaaatggctgcccatactgttattcgcgagccacagatcttcagccggataaatatcggacatgccaggcacgataatacggcaagcataaacgcccagatgctcgtaatcggcaatataaacttctttatcttctttgttgaagatagccatcagtgtggcgaactcttcttccgtggtgccggagaaattccagtccacaaacggataatcggcatcctgcttgaacaggtcccaggagattaaaccgctggaatcgataaagtgcgtttcgaggttggtatgttcagcgacttcttcatcatcgaaggttggcggagtaaacacatccaaatctttcaggccacgaccttgcagcagctcggtcacggtacgttccagtgctacgccaaaatcaggatgcgcaccgaaagaggcaaagcaggtaccgttagcaggattgaacagtaccacgcaaatcaccggatactggccgccaaggctaccgtcataagcgaagattgggaaaccctccgcttccagcgtttcgatggcttcaactactgctgggtaacgcgccagcacgtctgccgggatctctggcaggctgatgctttcagcaataatgcggtttttcacgtagcgttcgaaaacttcagacaatccctgaacgcgtgcttcgttgcgggtattacctgcggacataccgttggagacgtacaggttaccaatgatattcatcggaatataaacggtctgattgtcggactgacgcgtaaacggcaggccgcaaataccacgatcttcgttaccggattgtaggtcaatcagcatgctgccggtcagttcattctccggatcataaaacgcgcgcagacggtcatcgagcagcccttctggcacatcgtcattttcggtcagtgggaaccatttttcgttgggataatgcacgaacggaccgttggcgatggtttcgcccagccagaagtccgcaaaaaagtagttggtactgagacgctcgaaatattcaccgagtgcagaagccagcgccgctttcttggttgcgcctttaccgttggtaaaacacagtgcgcactctttgtcgcgaatatgtacagaccagacgttaggcacgggattcagccaggaggcctcttcaatctgaaagccgaggtcactaagtttttgctggaagcgagcgatggaatcttccagagcggcatctttgccggggataaatgtttgcgtcatgaaaatcactttagtcgtacggaaagcgcgcaataatacgggttttatctcaaaggcgctatcaccgccgccatgccgatgaactgttgactatgcttttagcggataaaccacgttaagagcataaaaatgaaggcgttcgatctccaccgtatggcatttgataaagtgccttttgatttccttggcgaagttgcactacgtagtctttatacctttgtactggtctttttgttcctcaaaatgaccggaagacgcggtgtgcggcagatgagcctgtttgaagttttaatcattctgacgctgggaagtgcggcgggagatgtggcgttttatgatgatgtgccgatggtcccggtacttatcgtctttattactctggcgttgttataccgcctggtaatgtggttgatggcgcacagtgaaaaactggaagatcttctggaaggcaagccagttgtcattattgaagatggcgagctggcctggagcaaactcaataactccaacatgacggaatttgagttctttatggagctacgattgcgtggcgtggagcagctggggcaggtacgtctggcgattctcgaaaccaacgggcaaatcagtgtctatttctttgaagatgacaaggtgaaaccgggtttacttattttacccagtgattgtacgcagcgttacaaagtggtgccggagagcgcggactatgcctgtattcgttgtagtgaaatcattcatatgaaagcgggggaaaaacaattatgtccgcgctgtgcaaatccagaatggacgaaggcaagtcgggcaaaacgggtgacctgacagtaaaaacatcggctttttgctaataatccgagagattcttttgtgtgatgcaagccacatttttgccctcaacggttttactcattgcgatgtgtgtcactgaatgataaaaccgatagccacaggaataatgtattacctgtggtcgcaatcgattgaccgcgggttaatagcaacgcaacgtggtgaggggaaatggctcaaatcttcaattttagttctggtccggcaatgctaccggcagaggtgcttaaacaggctcaacaggaactgcgcgactggaacggtcttggtacgagcgtgatggaagtgagtcaccgtggcaaagagttcattcaggttgcagaggaagccgagaaggattttcgcgatcttcttaatgtcccctccaactacaaggtattattctgccatggcggtggtcgcggtcagtttgctgcggtaccgctgaatattctcggtgataaaaccaccgcagattatgttgatgccggttactgggcggcaagtgccattaaagaagcgaaaaaatactgcacgcctaatgtctttgacgccaaagtgactgttgatggtctgcgcgcggttaagccaatgcgtgaatggcaactctctgataatgctgcttatatgcattattgcccgaatgaaaccatcgatggtatcgccatcgacgaaacgccagacttcggcgcagatgtggtggtcgccgctgacttctctagtaccattctttcccgtccgattgacgtcagccgttatggtgtaatttacgctggcgcgcagaaaaatatcggcccggctggcctgacaatcgtcatcgttcgtgaagatttgctgggcaaagcgaatatcgcgtgtccgagcattctggattattccatcctcaacgataacggctccatgtttaacacgccgccgacatttgcctggtatctatctggtctggtctttaaatggctgaaagcgaacggcggtgtagctgaaatggataaaatcaatcagcaaaaagcagaactgctatatggggtgattgataacagcgatttctaccgcaatgacgtggcgaaagctaaccgtagccggatgaacgtgccgttccagttggcggacagtgcgcttgacaaattgttccttgaagagtcttttgctgctggccttcatgcactgaaaggtcaccgtgtggtcggcggaatgcgcgcttctatttataacgccatgccgctggaaggcgttaaagcgctgacagacttcatggttgagttcgaacgccgtcacggttaatgccgaaattttgcttaatccccacagccagcctgtggggtttttatttctgttgtagagagttgagttcatggaatccctgacgttacaacccatcgctcgtgtcgatggcactattaatctgcccggttccaagagcgtttctaaccgcgctttattgctggcggcattagcacacggcaaaacagtattaaccaatctgctggatagcgatgacgtgcgccatatgctgaatgcattaacagcgttaggggtaagctatacgcttagtgccgatcgtacgcgttgcgaaattatcggtaacggcggtccattacacgcagaaggtgccctggagttgttcctcggtaacgccggaacggcaatgcgtccgctggcggcagctctttgtctgggtagcaatgatattgtgctgaccggtgagccgcgtatgaaagaacgcccgattggtcatctggtggatgcgctgcgcctgggcggggcgaagatcacttacctggaacaagaaaattatccgccgttgcgtttacagggcggctttactggcggcaacgttgacgttgatggctccgtttccagccaattcctcaccgcactgttaatgactgcgcctcttgcgccggaagatacggtgattcgtattaaaggcgatctggtttctaaaccttatatcgacatcacactcaatctgatgaagacgtttggtgttgaaattgaaaatcagcactatcaacaatttgtcgtaaaaggcgggcagtcttatcagtctccgggtacttatttggtcgaaggcgatgcatctagcgcttcttactttctggcagcagcagcaatcaaaggcggcactgtaaaagtgaccggtattggacgtaacagtatgcagggtgatattcgctttgctgatgtgctggaaaaaatgggcgcgaccatttgctggggcgatgattatatttcctgcacgcgtggtgaactgaacgctattgatatggatatgaaccatattcctgatgcggcgatgaccattgccacggcggcgttatttgcaaaaggcaccaccacgctgcgcaatatctataactggcgtgttaaagagaccgatcgcctgtttgcgatggcaacagaactgcgtaaagtcggcgcggaagtggaagaggggcacgattacattcgtatcactcctccggaaaaactgaactttgccgagatcgcgacatacaatgatcaccggatggcgatgtgtttcagcctggtggcgttgagtgatacaccagtgacgattcttgatcccaaatgcacggccaaaacatttccggattatttcgagcagctggcgcggattagccaggcagcctgaatgaacaacgggcaataaatagccaaatctttctttatcaaaacgtcggcacattgtcggcgttttttttcggaccttgtgagtcattttgattaatggtagcgtcgcttgtcaatgtaagttgttgatacataatatttatatatgattaatcaacggatgattcacatgaagaatactaaattactgctggcgattgcgacctctgcagcattactgacagggtgtcaaaatacccacggtattgataccaatatggctatcagctccggtttaaatgcctataaagcagcaacattaagcgatgccgatgcaaaagcgattgccaatcagggctgtgccgaaatggacagcggcaatcaagtcgcaagtaaatccagcaagtacggtaaacgtctggcaaaaatcgccaaagcattgggtaacaatattaatggcacgccggtcaactataaggtttatatgaccagcgacgtcaacgcatgggcgatggcgaacggctgtgttcgtgtctacagtggcctgatggacatgatgaatgacaacgaaattgaaggcgttctgggccatgaactgggccacgtcgcgttgggtcacagcctggctgaaatgaaagcttcttatgcgatcgttgccgcacgcgatgccattagtgctaccagcggtgtggcttcccagctttcccgcagtcaattaggtgatatcgcagaaggcgctatcaatgctaaatactcccgtgataaagagtccgaagcagatgatttctcctttgatctgttgaagaaacgtggcatcagcacccaggggctggttggcagctttgaaacactggctagcctggatggcggtcgcacccagtccatgtttgactctcacccaccaagtacagagcgtgcgcaacacatccgtgatcgtatcgcctctggtaagtaaatcattgtcatctttcgggctggtcttctgccagcccgctataattgcgcaataaatccccatctgaatacagacaaaactggtttttgcacacaacgttaacgatttgtggcgtcggcgcgtataatgcgcgcggttatgttaacggtacgcctgttttaaggagataaagatgacggcaattgccccggttattaccattgatggcccaagcggtgcagggaaaggcaccttgtgtaaggctatggcggaagcgttgcaatggcatctgctggacagcggtgcaatttatcgcgtactggcattggcggcattacatcaccatgttgatgttgcgagcgaagatgcgctggtaccgctggcatcccatctggatgtacgttttgtgagcaccaatggcaatctggaagtgatcctcgaaggggaagatgtcagcggcgaaattcgtactcaggaagtggcgaatgcagctagtcaagtcgcggcattcccacgcgttcgtgaagcattattgcgtcgccaacgcgcgtttcgcgaattaccaggtctgattgccgatggccgcgacatgggaacggtggtattccctgatgcaccagtgaaaattttccttgacgcctccagcgaagaacgtgcgcatcgccgcatgctacagttgcaggagaagggctttagtgttaactttgagcgccttttggccgagatcaaagaacgcgacgaccgcgatcgtaaccgagcggtagcgccactggttccggcagccgatgctttagtgttggattccaccaccttaagcattgagcaagtgattgaaaaagcgctacaatacgcgcgccagaaattggctctcgcataagcgaccgaatttgcagtacccccgttgcaatggaatgacagcgggtatgttaaacaaccccatccggcatggagccaggtggacgttaaatataaacctgaagattaaacatgactgaatcttttgctcaactctttgaagagtccttaaaagaaatcgaaacccgcccgggttctatcgttcgtggcgttgttgttgctatcgacaaagacgtagtactggttgacgctggtctgaaatctgagtccgccatcccggctgagcagttcaaaaacgcccagggcgagctggaaatccaggtaggtgacgaagttgacgttgctctggacgcagtagaagacggcttcggtgaaactctgctgtcccgtgagaaagctaaacgtcacgaagcctggatcacgctggaaaaagcttacgaagatgctgaaactgttaccggtgttatcaacggcaaagttaagggcggcttcactgttgagctgaacggtattcgtgcgttcctgccaggttctctggtagacgttcgtccggtgcgtgacactctgcacctggaaggcaaagagcttgaatttaaagtaatcaagctggatcagaagcgcaacaacgttgttgtttctcgtcgtgccgttatcgaatccgaaaacagcgcagagcgcgatcagctgctggaaaacctgcaggaaggcatggaagttaaaggtatcgttaagaacctcactgactacggtgcattcgttgatctgggcggcgttgacggcctgctgcacatcactgacatggcctggaaacgcgttaagcatccgagcgaaatcgtcaacgtgggcgacgaaatcactgttaaagtgctgaagttcgaccgcgaacgtacccgtgtatccctgggcctgaaacagctgggcgaagatccgtgggtagctatcgctaaacgttatccggaaggtaccaaactgactggtcgcgtgaccaacctgaccgactacggctgcttcgttgaaatcgaagaaggcgttgaaggcctggtacacgtttccgaaatggactggaccaacaaaaacatccacccgtccaaagttgttaacgttggcgatgtagtggaagttatggttctggatatcgacgaagaacgtcgtcgtatctccctgggtctgaaacagtgcaaagctaacccgtggcagcagttcgcggaaacccacaacaagggcgaccgtgttgaaggtaaaatcaagtctatcactgacttcggtatcttcatcggcttggacggcggcatcgacggcctggttcacctgtctgacatctcctggaacgttgcaggcgaagaagcagttcgtgaatacaaaaaaggcgacgaaatcgctgcagttgttctgcaggttgacgcagaacgtgaacgtatctccctgggcgttaaacagctcgcagaagatccgttcaacaactgggttgctctgaacaagaaaggcgctatcgtaaccggtaaagtaactgcagttgacgctaaaggcgcaaccgtagaactggctgacggcgttgaaggttacctgcgtgcttctgaagcatcccgtgaccgcgttgaagacgctaccctggttctgagcgttggcgacgaagttgaagctaaattcaccggcgttgatcgtaaaaaccgcgcaatcagcctgtctgttcgtgcgaaagacgaagctgacgagaaagatgcaatcgcaactgttaacaaacaggaagatgcaaacttctccaacaacgcaatggctgaagctttcaaagcagctaaaggcgagtaattctctgactcttcgggatttttattccgaagtttgttgagtttacttgacagattgcaggtttcgtcctgtaatcaagcactaagggcggctacggccgcccttaatcaatgcagcaacagcagccgcttaatttgcctttaaggaaccggaggaatcatgaccaagagtgaattgatagaaagacttgccacccagcaaagccacattcccgccaagacggttgaagatgcagtaaaagagatgctggagcatatggccagcactcttgcgcagggcgagcgtattgaaatccgcggtttcggcagtttctctttgcactaccgcgcaccacgtaccggacgtaatccgaagactggcgataaagtagaactggaaggaaaatacgttcctcactttaaacttggtaaagaactgcgcgatcgcgccaatatttacggttaagttttttactcaaacttgaacgagagaaaagcacctgtcgggtgcttttttcatttctctaatctggaactggaagctgcctcgcagagttttgaacagttttcaccctttcgttaaattcttctgaatatgcctcggggaacgcaaaattcccaccagacaaccgctcaacaaagttgcacactttccataaacagggaggggtgcatgaaaataacgacagtcggtgtatgcataattagcggaatttttccgttgctgattttgccccaattgcctgggacattaacccttgcgtttctgactctcttcgcctgcgtactggcatttatccctgttaaaaccgtccgttatatcgcgctgacgttgctgtttttcgtttggggcatattaagtgcaaagcaaattttgtgggcaggagaaaccttaactggcgcgacgcaggatgcaattgttgagatcactgcaactgacggcatgaccactcattacggtcaaattactcatctacaaggtcgacgtatattccctgcgagtggtctcgtgatgtatggcgaatatcttccgcaagcggtttgtgctggacaacaatggagtatgaaactcaaagttcgtgcagttcatggccaacttaatgatggcggctttgatagccagcgttatgccattgcccagcatcagccgctcaccggccgttttctgcaggcaagtgtcattgaaccgaattgtagcctgcgtgcacagtatctggcgagtctacaaacaacgctgcaaccctatccgtggaatgcggttattcttggtttaggtatgggggaacggttatccgtccccaaagaaatcaaaaatatcatgcgcgatactggaacggcgcatttaatggcgataagcggattgcacatcgcttttgcggcgttgctggctgccggactcattcgcagtggacaaatttttctgcctgggcgctggatccactggcaaataccattaattggcggaatctgctgtgctgctttttatgcctggttgacgggaatgcaacctcctgcattgcgtaccatggtggcgcttgctacgtggggaatgcttaagttaagtgggcgacagtggagtggctgggatgtatggatatgttgtctggcggcaattttgctgatggatcctgttgccattctcagccaaagtttatggctctctgccgctgcggtcgcggcattgatattttggtatcagtggtttccctgtcctgagtggcaactgccgccggtattgcgtgcagttgtttccctcatccatctgcaactgggaatcacacttctgcttatgcccgtgcaaatcgtcatatttcatggcattagtctgaccagctttattgcaaatctattagcaattcccttggtgacatttatcacggttccgttgatcctcgccgcgatggttgtgcatttaagcgggccgttaatcctggagcaagggttatggtttcttgccgaccggtctttggctttacttttctgggggttaaagagtttgccggaagggtggatcaacattgctgaatgttggcaatggctaagtttttccccatggttcttactggtggtatggcgattaaacgcctggcgaacgttgccagcaatgtgtgtggctggaggcttgctgatgtgctggccgctgtggcaaaaacctcgacctgacgagtggcagctgtacatgcttgatgtcgggcaagggctggcaatggtgatagccagaaacggcaaagcgattctctatgacacaggactggcctggcctgaaggggatagtgggcaacaactgattatcccctggctccactggcataatcttgaaccggaaggcgttattctgagccatgaacatctggatcaccggggagggctggatagtatattgcatatatggccgatgttatggatcagaagtccgttaaactgggaacatcatcagccctgtgtgcgtggcgaagcgtggcaatggcaaggattgcgtttcagcgcgcactggcctttacaaggtagcaacgataaaggaaataaccattcctgtgtggttaaggttgatgacgggacgaatagcattcttctaaccggtgatattgaagccccagctgaacaaaagatgctaagccgttactggcagcaagtgcaggcaacattgcttcaggtacctcaccatggcagtaataccagtagtagcttgccattaattcagcgagtgaatggaaaagtggcactcgcaagcgcaagccgctataacgcatggcgactgccctctaacaaagttaagcatcgctatcaactgcaaggatatcaatggattgatactccacatcaaggtcaaacaacggtcaattttagtgcgcaaggctggcggattagcagcctcagggagcaaattttacctcgttggtatcatcagtggtttggcgtgccagtggataacgggtaaaatatgcggctatttcaacaaatgctggttttttgaatgcataacgacaaagatctctctacgtggcagacattccgccgactgtggccaaccattgcgcctttcaaagcgggtctgatcgtggcgggcgtagcgttaatcctcaacgcagccagcgataccttcatgttaagcctccttaagccacttcttgatgatggctttggtaaaacagatcgctccgtgctggtgtggatgccgctggtggtgatcgggctgatgattttacgtggtatcaccagctatgtctccagctactgtatctcctgggtaagtggaaaggtggtaatgaccatgcgtcgccgcctgtttggtcacatgatgggaatgccagttagtttctttgacaaacagagtacgggtacgctgttgagtcgtattacctacgattccgaacaggttgcttcttcttcttccggcgcactgattactgttgtgcgtgaaggtgcgagcatcatcggcctgttcatcatgatgttctattacagttggcaactgagcatcattttgattgtgctggcaccgattgttagcattgcgattcgcgttgtaagcaagcgttttcgcaacatcagtaaaaacatgcagaacaccatggggcaggtgaccaccagcgcagaacaaatgctgaagggccacaaagaagtattgattttcggtggtcaggaagtggaaacgaaacgctttgataaagtcagcaaccgaatgcgtcttcaggggatgaaaatggttagtgcctcttccatctctgatccgatcattcagctgatcgcctctttggcgctggcgtttgttctgtatgcggcgagcttcccaagtgtcatggatagcctgactgccggtacgattaccgttgttttctctagtatgattgcactgatgcgtccgctgaaaagcctgaccaacgttaacgcccagttccagcgcggtatggcggcttgtcagacgctgtttaccattctggacagtgagcaggagaaagatgaaggtaagcgcgtgatcgagcgtgcgactggcgacgtggaattccgcaatgtcacctttacttatccgggacgtgacgtacctgcattgcgtaacatcaacctgaaaattccggcagggaagacggttgctctggttggacgctctggtagcggtaaaagtaccatcgccagcctgatcacgcgtttttacgatattgatgaaggcgaaatcctgatggatggtcacgatctgcgcgagtataccctggcgagcttacgtaaccaggttgctctggtgagccagaatgtccatctgtttaacgatacggttgctaacaacattgcttacgcacggactgaacagtacagccgtgagcaaattgaagaagcggcgcgtatggcctacgccatggacttcatcaataagatggataacggtctcgatacagtgattggtgaaaacggcgtgctgctctctggcggtcagcgtcagcgtattgctatcgctcgagccttgttgcgtgatagcccgattctgattctggacgaagctaccagcgctctggataccgaatccgaacgtgcgattcaggcggcactggatgagttgcagaaaaaccgtacctctctggtgattgcccaccgcttgtctaccattgaaaaggcagacgaaatcgtggtcgtcgaggatggtgtcattgtggaacgcggtacgcataacgatttgcttgagcaccgcggcgtttacgcgcaacttcacaaaatgcagtttggccaatgatcgaaaaaatctggtctggtgaatcccctttgtggcggctattgctgccactctcctggttgtatggcctggtgagtggcgcgatccgtctttgctataaactaaaactgaagcgcgcctggcgtgcccccgtaccggttgtcgtggttggtaatctcaccgcaggcggcaacggaaaaaccccggtcgttgtctggctggtggaacagttgcaacagcgcggtattcgcgtgggggtcgtaagccggggatatggtggtaaggctgaatcttatccgctgttattgagcgcagataccacaacagcacaggcgggtgatgaacctgtgttgatttatcaacgcactgatgcgcctgttgcggtttctcccgttcgttctgatgcggtaaaagccattctggcgcaacaccctgatgtgcagatcatcgtaaccgacgacggtttacagcattaccgtctggcgcgtgatgtggaaattgtcgttattgatggtgtgcgtcgctttggcaatggctggtggttgccggcggggccaatgcgtgagcgagcggggcgcttaaagagcgttgatgcggtaatcgtcaacggcggtgtccctcgcagcggtgaaatccccatgcatctgctgccgggtcaggcggtgaatttacgtaccggtacgcgttgtgacgttgctcagcttgaacatgtagtggcgatggcggggattgggcatccgccgcgcttttttgccacgctgaagatgtgtggcgtacaaccggaaaaatgtgtaccgctggccgatcatcagtctttgaaccatgcggatgtcagtgcgttggtaagcgccgggcaaacgctggtaatgactgaaaaagatgcggtgaaatgccgggcctttgcagaagaaaattggtggtatttgcctgtagacgcacagcttagtggtgatgaaccagcgaaactgcttacgcaactaaccttgctggcttctggcaactaattacgccgcggcagcgttcgattgatggagtcatgaatgagcctgccgcacctctcccttgctgatgcgcgtaatcttcaccttgccgcacaaggcctgttaaacaaaccccgccgtcgagcgagcttggaggatattccggcaacgatctcccgcatgtccttgctgcaaatcgataccatcaatattgttgcccgtagtccatatctggtgcttttcagtcgtctgggaaattatcctgcccagtggctggatgagtctctggcgcgtggcgaattaatggaatactgggcgcatgaagcctgctttatgccgcgtagcgactttcgtcttattcgccaccgcatgctggcacctgaaaaaatgggctggaaatacaaagacgcctggatgcaggaacatgaggcggaaattgcacagttaattcagcatattcatgataaggggccggtacgtagtgccgattttgagcatcctcgtaaaggtgcaagcggctggtgggaatggaagccgcataaacggcatctggaaggtttatttactgccggaaaggtgatggtgattgaacggcgcaacttccagcgcgtttatgatttaacccaccgtgtcatgcctgactgggatgatgagcgcgatctcgttagccaaacagaagcagaaatcatcatgctggataacagtgcgcgtagcctgggaatattccgcgaacagtggctggcagattactatcggctgaaacgtccggcactggcggcgtggcgcgaagcgagggctgaacagcagcaaatcattgctgtgcatgttgaaaaattgggcaatctttggctgcatgatgatttgctgccgctactcgagcgagcgctggccggaaagctcactgcaacgcacagcgcggtacttagcccttttgatcctgttgtctgggatcgcaaacgcgcagagcagctttttgattttagctaccggctggagtgctataccccagcgccgaaacgccagtatggctattttgttctgccgttattacatcgtgggcaattagttgggcgaatggatgccaaaatgcatcgccagacaggcatccttgaagttatctctctgtggttacaggaaggtattaaaccaacgacaacgctgcaaaaagggctacgtcaggcgattactgatttcgctaactggcagcaggcaacgcgggtgacattaggatgctgcccgcaaggcctctttactgattgccgcaccggctgggaaatagaccccgtcgcataaatgattatgataagatttatgcattcataacccgatccatctggaggaactatggatcatcgtctgcttgaaatcattgcctgcccggtttgcaacggaaaactttggtataaccaggaaaaacaagagcttatttgcaaactggacaacctcgctttcccgctgcgtgatggcattccagtgttgctggaaacggaagcccgcgtgctgactgctgatgagagtaaaagttgatgtaaactgctgatgagagtaaatcatgagttttgtggtcattattcccgcgcgctacgcgtccacgcgtctgcccggtaaaccattggttgatattaacggcaaacccatgattgttcatgttcttgaacgcgcgcgtgaaagtggtgccgagcgcatcatcgtggcaaccgatcatgaggatgttgcccgcgccgttgaagccgctggcggtgaagtatgtatgacgcgcgccgatcatcagagtggaacagaacgtctggcggaagttgtcgaaaaatgcgcattcagcgacgacacggtgatcgttaatgtgcagggtgatgaaccgatgatccctgcgacaatcattcgtcaggttgctgataacctcgctcagcgtcaggtgggtatggcgactctggcggtgccaatccacaatgcggaagaagcgtttaacccgaatgcggtgaaagtggttctcgacgctgaagggtatgcactgtacttctctcgcgccaccattccttgggatcgtgatcgttttgcagaaggccttgaaaccgttggcgataacttcctgcgtcatcttggtatttatggctaccgtgcaggctttatccgtcgttacgtcaactggcagccaagtccgttagaacacatcgaaatgttagagcagcttcgtgttctgtggtacggcgaaaaaatccatgttgctgttgctcaggaagttcctggcacaggtgtggatacccctgaagatcttgagcgcgttcgcgctgaaatgcgctaatttcacttcacgacacttcagccaattttgggaggagtgtcgtaccgttacgattttcctcaatttttcttttcaacaattgatctcattcaggtgacatcttttatattggcgctcattatgaaagcagtagcttttatgagggtaatctgaatggaacagctgcgtgccgaattaagccatttactgggcgaaaaactcagtcgtattgagtgcgtcaatgaaaaagcggatacggcgttgtgggctttgtatgacagccagggaaacccaatgccgttaatggcaagaagctttagtacgcccggaaaagcccgacaactggcatggaaaaccaccatgctggcaagaagtgggactgtccgtatgccgactatttatggtgtgatgacgcatgaagaacaccccggccccgatgtcctgctactggagcggatgcgtggtgttagcgtggaggcaccagcccgaacaccagaacgctgggaacaactcaaagaccaaatcgttgaagccttactggcctggcaccgtcaggacagtcgcggttgcgtcggcgcggtcgacaatactcaggaaaatttctggcccagttggtaccggcaacatgttgaagtgctatggaccacgctcaatcagttcaataacaccggtctgacgatgcaggataagcggatcctgtttcgcactcgcgaatgtctcccggcattatttgaaggctttaacgacaattgtgtgctgattcacggtaacttctgtttacgcagcatgttgaaagatagccgcagcgatcagttactggcgatggtcgggccgggactaatgctttgggcaccgcgagaatacgaactgttccgactaatggataattctctggcggaagatttgctctggagttacctgcaacgcgcgccagtggcggagagcttcatctggcggcgttggttgtatgtgttatgggatgaagttgcgcaactggttaataccggacgatttagtcggcgcaacttcgatctggcaagtaaaagtctcttgccgtggctcgcctgatcactcttgccgtggctcgccactgctaccttttagccactgccagatacggccaagcgtttcatagccaacacgatcgctatgcatcaaccagaccggagaagggattgcccgttcccacgggttaagcgggctgtcgatggccaactgattcgccggggctggtagcggatttaacccttcctgctgaaaaaagatcatcgcccgcggcagatgacttgcggaggtcaccagcaggaaaggggcgtcaccaatcgcctgtttcactgctgcagcttcttcttcggtatcttttggcaaatccagggtgataatttgctcgcgcggcacgcccaggctttgcgcaactctggcacctacttccgctgtactcaccgtattggtttttgctacgcctcccgtgaagatcagtttacttcccggattttcgcgccataagcgaataccttcattcaggcgtggcagactgttattgattaaattagagctcggtgcccactgcgggttccaggtataaccacctccgagcaccacgatatagtccactttttggctattattccatgtcggataggtgctttcgatgggacgcagcaggcggtcggctaccggttgcaaactcaataacaagagcgccagccacccaatgctaataaaaatcttcccggttttttgaaaacggctaaaccacagcagcgccaggccagcgccaataatcaacaacatcagcggaagtggcagcaacatattgccaatcacttttttcagtgtaaaaagcatcctttctggttccttttttaaccatatagcaagggatcgccagcgatattacaccagacgggttcattctcgccgtggctgtgacaaaatagcgtctttatcagaaaacgtcttagccaaccggtggagaaagcaatgcaggatcgcaattttgatgatattgcggaaaagttttcccgtaacatttacggcaccaccaaagggcagcttcgacaggctattctgtggcaggatctcgatcgcgtgctggcggaaatgggcccgcaaaaactgcgtgtgctggatgctggcggtggagaagggcagaccgcaatcaaaatggccgagcgtgggcatcaggtcattttatgcgatctttctgcgcagatgatcgaccgcgcaaaacaggcggcagaagcaaaaggtgtgagcgacaacatgcaatttatacattgcgccgctcaggatgttgctagccatttggaaacgcccgttgatctgatattgttccatgcggtgctcgagtgggtggctgatccccgcagcgtattgcagaccctctggagtgtgttgcgtccaggcggcgtgttgagcttaatgttctacaatgcgcatggtttgttgatgcataacatggtcgccgggaattttgattacgtgcaggcgggaatgccgaaaaagaaaaaacggacgcttagcccagattatccacgcgacccggcgcaggtttatctgtggctggaagaagctggttggcaaattatgggtaagacaggcgttcgcgtgtttcatgattatctgcgcgagaaacaccagcagcgcgactgctatgaagcattacttgaattagaaacgcgttattgccgtcaggaaccgtatattaccctggggcgttatattcatgtcaccgcgcgcaaaccgcagagcaaggataaagtatgagtgaattttcccagacagtccccgaactggttgcctgggccagaaaaaatgacttctccatcagcctgccggtagaccgactctcttttctgctggcggttgccacgctgaacggcgagcgtctggatggtgagatgagtgaaggcgagctggtggatgcattccgccatgtgagtgatgcgtttgagcaaaccagcgaaaccatcggcgtgcgcgccaataacgcgatcaacgacatggtgcgtcaacgtctgctgaaccgctttaccagcgagcaggcggaagggaacgcaatttaccgtctgacgccgctcggcatcggcattactgactactacatccgtcagcgcgagttttctacgctgcgtctttctatgcagttgagcattgtggcgggtgagctcaaacgcgcagcagatgccgccgaagagggcggtgatgaatttcactggcaccgtaatgtctatgcgccactgaaatatagcgtagcagaaattttcgacagtatcgacctgacgcaacgtctgatggacgaacagcagcagcaggtgaaggacgatatcgcccagttgctgaacaaagactggcgggcggcgatttccagctgtgaattgttgcttagcgaaacttccggaacgctgcgtgaattgcaggatacgctggaagcggcaggcgacaaattgcaggctaatctgttgcgcattcaggatgcgacgatgacccatgacgatctgcatttcgtcgatcgtctggtgttcgatctgcagagcaaactcgatcgtattatcagttggggccagcaatccatcgacttgtggattggctacgaccgccacgtacacaaatttattcgtaccgcgatcgatatggataaaaaccgcgtctttgctcagcggttacgtcagagcgtacaaacctattttgatgagccgtgggcgctaacttatgccaatgccgatcgtctgctggatatgcgtgacgaagagatggcactgcgcgatgaagaagtgactggggaacttcctgaggatctggaatacgaagagtttaacgagatccgcgaacagctggcggcgatcatcgaagaacaacttgccgtgtacaaaaccagacaagtgccgctggatcttggtctggtggtacgcgaatatctgagtcagtatccgcgtgcacgtcactttgacgttgcgcgtattgttattgatcaggcggtacgtcttggcgtagcgcaagcagatttcaccggactgccagcgaaatggcagccgattaatgattacggagccaaggtacaggcgcatgtcatcgacaaatattgaacaagtgatgccggttaagctggcgcaggcgctggcgaatccgttatttccggcgctggacagcgccttacgtagtggacgccatattggcctcgacgaactggataatcatgcattcctgatggattttcaggaatatctggaagagttttacgcgcgttataacgttgagcttattcgcgcaccagaagggttcttctatttacgcccacgttccaccacgctgatccctcgttccgtcttgagcgaactggatatgatggtcgggaaaatcctctgttatctctatctcagcccggaacggctggcgaatgaggggattttcacccagcaggaactgtacgacgaactgctcaccctggccgatgaagcaaaactgctgaaactggtgaacaaccgtagtaccggtagtgacgttgaccgtcagaagttgcaggagaaagtacgttctagcctcaaccgtctgcgtcgtttaggcatggtgtggtttatgggccacgacagcagcaagtttcgcattaccgaaagcgtgttccgcttcggagccgatgtgcgtgctggcgacgatccccgtgaagcacagcgtcgcctgattcgtgatggcgaagcaatgccgattgaaaatcatctgcaactcaacgatgaaaccgaagagaatcagccagatagcggagaggaagaataatgattgaacgcggtaaatttcgcagtctgacgctgattaactggaacggcttttttgcccgaacttttgaccttgacgagctggtcacgacgctttctggcggtaacggggcgggtaaatccaccaccatggcggcgttcgttacggcgctgatccccgacctgaccctgctgcatttccgtaacactacggaagccggggccaccagcggtagccgcgataaaggtctgcacggtaagctgaaagcgggtgtctgttatagcatgctcgacaccattaacagccgccaccagcgcgtggtggtcggtgtgcgtctgcaacaggttgccggacgcgatcgtaaagtggatatcaagccgtttgccattcagggactgccgatgagcgtgcagccgacacagctggtgaccgaaaccctgaacgaacgccaggcgcgcgtgctgccgcttaacgagctgaaagacaagctcgaggcgatggaaggcgtgcagtttaaacagttcaactccattactgattaccacagcctgatgttcgatctgggcatcatcgcgcgtcgtctgcgctccgcatctgaccgtagcaaattctatcgtctgatcgaagctagcctgtatggcgggatctccagtgccattacccgttctctgcgcgactacctgttgccagaaaacagcggcgtgcgtaaagcgttccaggacatggaagcggcgctgcgtgaaaaccgtatgacgctggaagcgattcgtgtcacccagagcgaccgcgacctgtttaagcatctgatcagcgaagccaccaactacgtggcggcggactacatgcgtcacgccaacgagcgccgtgtccatctcgacaaagccctggagtttcgtcgcgagctacatactagccgtcagcaactggcggctgagcagtacaaacacgtcgatatggcgcgtgagctggcagagcacaacggtgccgaaggcgatctggaagcggattatcaggcggccagtgatcacctgaacctggtgcaaaccgcactgcgtcagcaggagaagatcgaacgctacgaagcggatctcgatgagctgcagatccgtctggaagagcaaaatgaagtggtggcagaagccatcgaacgccagcaagagaatgaggctcgtgcggaagctgccgaactggaagtggacgagctgaaaagccagcttgctgactaccagcaggcgctggacgtccagcaaacgcgcgcgatccagtataaccaggcgattgctgcgcttaatcgtgccaaagaactgtgccatctgccggacttaaccgccgactgcgccgccgaatggctggaaaccttccaggcgaaagagctggaagcgactgaaaaaatgctctctcttgagcagaaaatgagcatggcgcaaaccgcgcacagccagtttgagcaggcttatcagctggtggtggcaatcaacggcccactggcgcgtaacgaggcgtgggatgtcgctcgcgaactattgcgcgaaggggtcgatcagcgtcacctggcagagcaggttcagccgctgcggatgcgattaagcgaactggaacagcgtctacgcgagcagcaagaagctgagcgtctgctggcagatttctgcaaacgtcagggcaagaattttgatatcgacgaactggaagccctgcatcaggaactggaagcacgcattgcctctctttccgatagcgtgtctaacgcccgtgaagagcgcatggcactgcgccaggagcaggaacagctgcagtctcgcattcagagtttgatgcagcgtgcgccggtttggctggcagcgcaaaacagtctcaaccagttgagcgaacagtgcggcgaagagtttacctccagccaggacgtcaccgaatatctgcaacagttgctggagcgtgagcgagaggcgattgttgaacgcgatgaagtgggcgcgcgcaaaaacgccgtcgatgaagagatcgaacgtttaagccagcctggcggctctgaagatcagcgtctgaacgcgctggcggagcgttttggtggtgtgctgctgagtgaaatttatgacgacgttagcctggaagatgcgccgtacttcagtgcgctgtatggcccgagtcgccacgccatcgtggtgccagatctgagtcaggtaactgaacacctggaaggcttgaccgattgcccggaagatctctatctgatcgaaggagatccgcagagtttcgatgacagcgtgttcagcgttgatgagctggaaaaagcggtagtggtgaaaatcgccgatcgtcagtggcgttatagtcgtttcccggaagtgccgctgtttggtcgtgctgcgcgtgaaagccgtattgaaagcctccatgccgagcgtgaagtgctttccgaacgcttcgccacgctctcctttgatgtacagaaaactcagcgtctgcatcaggcgttcagccgctttatcggcagtcatctggcggttgcgtttgagtctgacccggaagcagaaatccgtcaactgaacagccgtcgcgtcgaactggagcgggcgttaagtaatcatgaaaatgataaccagcagcagcgtattcagtttgagcaggcgaaagagggcgttacggcgctgaaccgcattctgccgcgtctcaacctgttggctgatgacagcctggcggatcgcgtcgatgaaatccgcgaacgtctggatgaagcccaggaagccgcgcgttttgttcagcagtttggcaatcaactggcgaaactggaaccgattgttagcgtattgcagagcgacccggaacagttcgaacagttaaaagaagattacgcgtactctcagcagatgcagcgcgatgcccgtcagcaggcgtttgccctgacggaagtggtgcagcgtcgtgcgcactttagctattctgacagcgcagaaatgcttagcggtaacagcgatctcaacgaaaaactgcgtgaacgtctggaacaggcggaagcggagcgtacccgcgctcgcgaagcgttgcgcggtcacgcagcgcagttgagtcagtacaaccaggtgctggctagcctgaaaagttcttacgacaccaaaaaagagctactcaacgatctgcaacgtgaattgcaggatatcggcgtgcgtgctgatagcggggcagaagagcgggcgcgtattcgccgtgacgagctgcatgcgcaactgagcaataaccgtagtcgccgcaatcaactggaaaaagcgcttaccttctgcgaagcggagatggacaacctgacccgcaaactgcgcaagctggagcgggattactttgagatgcgcgagcaggtagtgaccgccaaagcgggctggtgtgcggtgatgcgcatggtgaaagataacggcgttgagcgccgcttacaccgtcgtgagctggcttatctctccgctgatgatttgcgttccatgagcgataaggcgttaggtgcgctgcgtctggcggtggcggataacgaacatctgcgcgacgtgctgcgcatgagcgaagatccgaaacgtccggagcgtaaaattcagttcttcgtggcggtttatcagcatctgcgtgaacgtattcgtcaggatattattcgtaccgatgatccggtggaagctatcgaacagatggagattgaacttagccgtctgaccgaagaattaacctcccgtgaacagaaactggcgatcagttcccgcagcgtggcgaacatcattcgcaaaaccattcagcgcgagcagaaccgtatccgtatgctcaaccaggggttgcagaacgtaagctttggtcaggtgaacagcgtgcgtctcaacgtgaacgtgcgtgaaacgcacgccatgctactggatgtgctctctgaacagcacgagcagcatcaggatctgtttaacagcaaccgtttgaccttcagcgaagcgctggcgaaactgtatcaacgtcttaacccgcagattgatatggggcagcgcacgccgcagaccatcggtgaagaactgctggattaccgcaactatctggaaatggaagttgaggttaaccgtggttccgatggctggctgcgcgcagagtctggtgcattgagcaccggtgaggcgattggtaccggtatgagcattctggtgatggtggtacaaagctgggaagatgaatctcgccgcctgcgcggtaaagatatctctccttgccgcctgctgttcctcgatgaagcagcgcgactggatgctcgttctatcgccacgctgtttgaattgtgtgagcgtttgcaaatgcaactcatcatcgcagcgccggaaaatatcagcccggagaaaggcaccacctataaactggtgcgtaaagtcttccagaataccgaacacgttcatgtcgtcggcctgcgaggatttgcgccgcaactccctgaaacgcttccaggaactgacgaagcgccttctcaggcgagttaaaattaaggcggcagcaatgccgccttttctttttccgaaaactccgtttctgcactaaaaaagtggcacattacggcgcgcttttctttaaacttctttacattaggttatgtaaaaacgtatcggcgtttatatactgaagataagcctgatgagtaacaggcttgctcgtcatactttcgtgagtattggcgttgtacaggcaagtcgtaaaataacagcctggctattcagagtatgataaaaacagggggcaagggatgttgcttaatatgatgtgtggtcgtcagctgagcgcaatcagtttgtgcctggccgtaacattcgctccactgttcaatgcgcaggccgatgagcctgaagtaatccctggcgacagcccggtggctgtcagtgaacagggcgaggcactgccgcaggcgcaagccacggcaataatggcggggatccagccattgcctgaaggtgcggcagaaaaagcccgcacgcaaatcgaatctcaattacccgcaggttacaagccggtttatcttaaccagcttcaactgttgtatgccgcacgcgatatgcaacccatgtgggaaaaccgtgatgctgttaaagccttccagcaacagctggcagaggtggcgattgccggtttccagccgcagtttaataaatgggtagagttactgaccgatcctggtgttaacgggatggcacgcgacgtggtgctctctgatgcgatgatgggctatctccatttcattgcaaatattccggtcaaaggcactcgctggctatatagcagtaaaccttatgcacttgcaacgccgccgctcagcgtgattaaccaatggcagctggcgctggataaaggtcaattgcctacgtttgttgcaggactggcaccgcagcatccgcaatatgcggcgatgcatgaaagcttactggccttactctgtgacaccaaaccgtggccccaactgaccggcaaagcaacgttgcgcccagggcagtggagtaacgacgtaccggcgttgcgcgaaatattgcaacgcacaggcatgttggacggggggccgaaaattactctacctggcgatgacacgccaactgacgcggtagtcagcccatccgctgttactgttgaaacagcagaaactaagccgatggataagcaaacgacgtctcgtagtaaacctgcgcctgccgttcgcgccgcctacgataatgaactggtggaagccgttaaacgttttcaggcatggcaaggattgggggcagatggtgctattggcccggcaacacgtgactggttaaacgtaacgcccgcccagcgtgctggtgtgttggctctcaacatccagcgattgcgcttgctgccaacagagctttctaccgggatcatggttaacattccggcctatagcctggtctactatcagaacggcaatcaggtgctggatagccgagtcattgtcggtcgccccgatcgcaaaacgccgatgatgagcagtgcccttaacaacgtagtggtaaacccgccgtggaacgtacctccaactctggcacgcaaagatattctgccaaaagtgcgcaacgatccgggatatctcgaaagccatggctatacggtgatgcgcggctggaacagcagagaagcgattgacccatggcaggttgactggtctacaatcacggccagcaatttaccgttccgcttccagcaggctccaggcccacggaacagcctggggcgctataaattcaatatgccgagtagtgaggccatttatttgcatgacacgccgaaccacaatctgttcaagcgtgatacacgcgcattgagcagtggctgtgtacgagtgaataaagcttccgatctggcgaatatgctgttgcaggatgcaggctggaatgacaaacgtatttctgatgcgctgaagcagggtgatacacgttacgtcaatattcggcagagcattccggtgaatctctactacctgacggcctttgttggtgcagatggtcgtacccagtatcgtacagatatttacaattatgatctgcctgcgcgatccagcagccaaatcgtaagcaaagcggaacaattaatcaggtaaatgaagtagttcggggaaatcagttgtcgtaataattagcatgattgggggcgattctctgcagcccccgtcactgctggggttgagtcatcttgacgtctgctttacgggcggttaaggtgcctcttgtgcgccagaagtgcatataaacgataacattgacctgtagacttgattatcatggacaaattcgacgctaatcgccgcaaattgctggcgcttggtggcgttgcactcggtgccgccatcctgccgacccctgcgtttgcaacactctctaccccacgcccgcgcattttgacactcaataatcttcataccggagagagtatcaaagcggagtttttcgatggcagaggctatattcaggaagaattggcaaaacttaaccattttttccgcgattaccgcgcgaacaaaataaagtccatcgacccaggattattcgaccagttgtatcgcctgcaagggttgttaggcacgcgcaaaccggtgcaactcatttccggttatcgttctattgataccaacaatgaactacgcgcccgcagccgtggagtagcgaagaaaagctatcacactaaaggccaggcgatggatttccatattgaaggtatcgcgttaagcaatattcgcaaagccgcgttatctatgcgcgcaggtggtgtaggatattatccacgtagtaactttgtgcatattgataccgggccagcacggcactggtaataattgcttaacgaaacaggggcagtatgaactatcgtattattccggtcaccgcattctcccagaactgtagtttaatctggtgtgaacaaacccgtctggccgcactggtcgatcctggcggcgatgcggaaaaaatcaaacaggaagttgatgacagcggcctgacactgatgcagatcctgctgacgcatggtcatctggaccacgttggcgcagcggcggaactggcgcaacattacggcgtgccggttttcggcccggaaaaagaagatgagttctggctgcaaggcttgcctgcgcaaagtcgtatgtttggtctggaagagtgccagccgctgacgccagatcgttggctgaacgaaggcgataccatcagcatagggaatgtgactttacaggtgttacattgccctgggcatacgccgggtcatgtcgtgttttttgatgatcgggcaaagctgctgatttctggcgatgttattttcaaaggcggagtagggcgcagtgacttcccgcgtggcgatcataatcaactgatttctagtatcaaagataaattgctgccactgggggatgacgtgatatttattccgggtcacggaccattatccacacttggttatgaacgcctgcataatcccttcctgcaagacgaaatgcccgtctggtaaggcacataaaaaagcccgcttttaatgctggcctggatttctggcaaagtgcgctttgtttatgccggatgcggcacgagcgccttatccggcctacaaaatcgtgcaaattcaaaatattgcaggggacgcgtaggcctgataagcgtagcgcatcaggcaatgttgcgtttgtcatcagtctcagcccgcttttcagcgggcttcattgtttttaatgcttacagcactgccacaatcgcttcgcacagcggagccatgttatctggtgtcatcccggccacatttacgcgaccagaagcaaccgcatatacgccaaactcttcgcgcagacgcagcacttgttcttttgtcaggccactgaaggagaacatgccgttctgtttgatgataaagctgaagtcgcggtttgcgcctttttcctgcagcgtattgacgaacaactgacgcatacgctgaatacgctggcgcatatcagtcagctcttgttcccaaatcgcacgtaacgcatcgttgctcaggatggtggcaacaacagaagcgccgtgtgctggtgggttagagtagttagcgcgaatcgccgctttcatttggctgaatgcgcgatcaacggtttcactgtcggcagcaaccagagtacaagcgccaacacgctcgttgtacaggccaaagtttttagagtaggaactggcaacaatcagctctttatgcatagccgcgaaagcgcgcagtccttcagcatcttcttccagaccacgggcaaaaccctggtaagcgaagtcaaacagcggtaaccagcctttctcaacggagagttgtgccagtgtttgccattgttccagcgtagggtcgataccggttgggttatggcagcagccatggaacagcactacgtcgccagcctgagcttcattcaggctgttaatcagtgcatcgaagtcaagagtgtgattttccgcatcataataagcgtattcacgaacttccagacctgcagagttaaagacgctcttatggttcggccagcttgggttgctcacccacacacgcttaacgctggtattttttgccaggaaatcggcagccacgcgtagtgcgccagtgccccccggagtctgtgccgtgcgagcacgtttgtcattgatcagggcgctacctttaccaaacagcagttcctgagtgcagcgaccaaattcagggatgccgtcaatgccgaggtaatttttggtggtttcattttcgagcagatactgttcagcctttttcacgctggtcagtaccggggttttgcccgtctcatctttatagacaccaatcccgaggttaattttgccgggacgttcatcggcacgaaacagatcggccaggcccagaatcgggtcggcaggagcggcggtaatgttctcaaacatgacgaggttccattatggttacagaagggaagtccgctatcagggtaacgggagatttacaaaattccaactattactgatgaaaacgcaggctgtttttgcaagacgtgagattgctctggaaggtataaaaaaaacaggaccaaagtcctgttttttcggcatttaacaaagaggtgtgctattagaactggtaaacgatacccacagcaacggtgtcgtcactacctacgcccagtttgttgtcagaatcgatctggttgatgatgtagtcaacataggtggacatgtttttgttgaagtagtaggttgcgcccacttcaaagtagttcaccagatcaacatcaccgataccttctacgtctttcgctttagatttggtgtaagcgatggacggacgcagaccgaaatcgaactggtattgcgcaactaacagaacgtcttgcgttttgttggcgaagccgctggtgtttgtaaatttattagtgatcggcgtagcgttacgggtttcaccgtagttcgctgccaggtagatgttgttcgcgtcgtacttcagaccagtagcccactgttcagcttttttaccgttgccaagaggttgagcttcttgcaggttggtacggtcagctgcaccataagcaccaacgataccaaagccttcgtattcgtagctgatagaaccgccaacaccgtcgccgttagaacggcgtgcagtgtcacgctcgtttttacccaggtactgaacagcgaagttcaggccatcaaccagaccaaagaagttggagttacgataggtagcaacgccgccaacacgaccaacgaagaagtcatcgctgtatgcagtatcaccaccaaattctggcagcatatcggtgtaacccagtgcatcataaaccacaccgtagttacggccgtaatcgaaagaaccaacgtcagcgtatttaagacccgcgaatgccagacgcgttttgttaccagtttgagcgtcagcgccttcagagttgttaccctggaagttatattcccactgaccataaccggtcagatcggaattgatttgagtttcccctttaaaaccaagacgggcataggtcatgtcgccattgccaccgtaactgttttcaccgttacccttggaaaaataatgcagaccaacagctttaccgtacagatctactttgttgccatctttgttatagatttctgcagcgtttgcagtacctgctactaacagagcagggacgatcactgccagaatattgcgcttcatcattatttattaccctcatggttttttttatgacacctgccactgccgtcaataagttctgtcaataaaaatttacggaactattgatgagagtttggtgtctttatgtgtctgcaggcatctttccattcaaactaacgtttcgctaccgtgaaagtgctacaaagataaagatttggtttcaaaaagaaaaaatatgtaaccaaaagtaaaatttaaggaactttgtgaacaccgtcatatttccatagagacgtgatgatatttacagcaattttaatctatttatatgatttccttatatttaaattaactaaacggaaattttgtttctgatggaaactttatcgacctggcacaaaatcttctttcagacatccagaatgccaaaaaatagtatgaaaattgtgctattagctaagaaaaaactaatccgcaataagaatgcggattagtttttgcgcgtaaatgttgcaatgtaatattccgtaacaggatgatcgttatggcggggttgcaaatagattgcttgacttaacaaacagataacttgacagaaaagataaaaaaagagccagcgggcgctggctcttgaagacgctaaattagaagctggcgttacgcggagtacgtgggaacggaatcacatcacgtacgttttgcacgccagttacgtaagcaatcagacgttcaaaaccaagaccgaaaccactatgcggaacagtaccgtagcgacgcagatcgcgataccaccagtaatcttctttattcaggcccatttccagcatacgctcgtccagcacgtccagacgttcttcacgctgggagccaccaatgatctcaccgatgcccggagccagaacgtccatagccgcaacggttttaccgtcttcgttaaggcgcatatagaacgctttaatatctttcggatagtttttaaccactaccggtgctttaaagtgttcttccgccagataacgctcatgctcagaagagagatcgactccccagtaaaccgggttttcaaacttcctgccgcagttttcgagaatggtcactgcgtcggtataatccacctgcgcaaaatcggcttcaatgaagcgttccagacgactaacggcatctttatctacgcgttcagcgaagaatttcatgtcgtcagcgcgttcttcgagaaccgctttgaagacatatttcagcatggcttcagccagacccgcaatatcgttcaggttagcaaacgccacttccggctccagcatccagaattccgccaggtgacggctggtgttggagttttcagcacggaaagtcgggccgaaggtataaattttggacaatgcgcaagcgtaggtttcgccgttcaactggccagatacggtcaggaaagactctttaccaaagaagtctttgtcgaaatccactttgccctgatcgttacgcggcaggttttccagatccagcgtagaaacgcggaacatttcgcctgcaccttcggtatcagatgcggtaatcagactcgtactaacccagaagaatccctgctcgttaaagaagcgatgcagcgcctgcgccagcgtatggcgaacgcgcgcgacggcaccaatcaggtttgtgcgcggacgcaggtgagcgacttcacgcagatactcaatgctgtggcgttttgccgccatcgggtaagtgtctggatcttcaacccaaccagcaacttcaaccttgctggcctgaatttcaaattgttgcccctggcccgggctcgccacgactttacccgtcacaatgacgctgcagccggtggtcagacgcaggacgtcttcattgtaattgggcagagaattattgatgacagcctgtacaggatcaaagcaggaaccgtcataaacggcgaggaaggagatgccagctttactatctcggcgggtacgtacccatccgcgcacggtgacttcgctgtcaacggctacacggccctggagtacgtcggctacaggcacaacgctcataatattctctctgttaatagtcggaaaaaataaacacttgtccacccgtaaatggggggatacctatgttacctggcatctgcaatcagacaagcagaattcgcaaatgcagcgaaagatttcggaattaaaggtaaaaaaagggagccgattagctccctgatgatattaactggcttttttaatatgcggaaggtcgaacgctttgcgcagcgcccgaacaaacgctttatcatggcagatagttttgccagggctgtcagaaagtttcgccaccggtttaccgttacactctaccaacttaatgacaatattcaggggttttacctgggggatatcgcaggtcaggcgagtcccaataccaaaacttaattgcacgcgggaagagaagtggcggtatagctcaaccgctttgcgtaaatccagattgtcagagaaaaccagcgttttactctgtggatcaattcccagcttttcataatgtgcaatggctttttcaccccattcaaccgggtcgccagagtcatgacgcaggccctgataccgactagcgaactcgacaccgaaatcacgcaggaaagcatccatagtgatgcagtcggttaatgcaatgccaagttggtcgggatactcttccagccaggcagcaagtgcagctcgctggctgttggctagatccgggctgatttgctgatgtgcctggaaccattcgtgtgcctgtgttcccatcggcgtgagggaaagccgacgcgccagatcgtagttgctggtgcccacaaaccaggattcctgttgcagacgcttaacgatggtttcttgtacttcgcgagaaaaacggcgacgggtgccaaaatccatcagatggaagcggctcatatcaagaccggcggttaacgcgctgaagtcgactaatttgctttccagcgtgtcgagggcttgcgcaacgtcggcctgcggactgcgatagcgatgtaccatttcactgataaccgccagcaaaggaacttcccagaggatgacttcacgccacgggccgcttaaacgaatatccagcttgccattatcgttggacacggtgacttgttccgggttaaagcggaactcgcgtaaccagttaagatagtcggccttaaagaaaggcagggcagaaagccactgatattcatcatcctgcaggcgcaggtgctgcatcgcctgaacctgttcacgaatagcatcggcataaatacccagcagatcgtcacctcggcaacgaaactccgccgcgacatgcacatcgtaatagtgatgaaacacggcttgctgcatatgcaacttataagcatctgtatccagcaagctgtgcagaacaggagaagcgaattgtgtcataggtgcgcagtagcgtcctcgtacaggagcgtttagtacaataaacatcttcaggaactgctggagtataccttgtttcgcaatttattgaaccccgatcacaccatatgccacctttctggtcgatggcattacgcggtgtatgttataaaaatgtagcaataaaggcgtttgtacctgaaaagatgaagattctgcatagcgcgatttacgcaacaggaatagactgaacaccagactctataaaagatgctaaaggttatttatgactcaacagccacaagccaaataccgtcacgattatcgtgcgccggattaccagattactgatattgacttgacctttgacctcgacgcgcaaaagacggtcgttaccgcggtcagccaggctgtccgtcatggtgcaagtgatgctccccttcgtctcaacggcgaagacctcaaactggtttctgttcatattaatgatgagccgtggaccgcctggaaagaagaagagggcgcactggttatcagtaatttgccggagcgttttacgcttaagatcattaatgaaataagcccggcggcgaataccgcgctggaagggctttatcagagtggcgatgcgctttgcacccagtgtgaagccgaaggtttccgccatattacgtattatctcgaccgcccggacgtgctggcgcgttttaccaccaaaattattgccgataaaatcaaatatcccttcctgctttccaatggtaaccgcgttgcgcaaggcgaactggaaaacggacgccattgggtacagtggcaggacccgttcccgaaaccgtgctacctgtttgcgctggtggcaggcgactttgatgtactgcgcgatacctttaccacgcgttctggtcgcgaagtagcactggagctgtacgtcgatcgcggcaaccttgatcgcgcgccgtgggcgatgaccagcctgaaaaactccatgaaatgggatgaagaacgctttggcctggagtatgacctcgacatctatatgatcgtcgcggtggatttcttcaatatgggcgcaatggagaataaggggctgaatatctttaactccaaatatgtgctggcccgcaccgacaccgccaccgacaaagattacctcgatattgaacgcgttatcggccatgaatatttccataactggaccggtaaccgagtgacctgtcgcgactggttccagctcagcctgaaagaaggtttaaccgtcttccgcgatcaggagttcagctctgaccttggttcccgcgcagttaaccgcatcaataatgtacgcaccatgcgcggattgcagtttgcagaagacgccagcccgatggcgcacccgatccgcccggatatggtcattgagatgaacaacttctacaccctgaccgtttacgagaagggcgcggaagtgattcgcatgatccacaccctgcttggcgaagaaaacttccagaaagggatgcagctttatttcgagcgtcatgatggtagtgcagcgacctgtgacgactttgtgcaggcgatggaagatgcgagcaatgtcgatctctcccatttccgccgttggtacagccagtccggtacaccgattgtgaccgtcaaagacgactacaatccggaaaccgagcagtacaccctgaccatcagccagcgcacgccagccacgccggatcaggcagaaaaacagccgctgcatattccgtttgccatcgaactgtatgataacgaaggcaaagtgatcccgttgcagaaaggcggtcatccggtgaattccgtgctgaacgtcactcaggcggaacagacctttgtctttgataatgtctacttccagccggtgcctgcgctgctgtgcgaattctctgcgccagtgaaactggaatataagtggagcgatcagcaactgaccttcctgatgcgtcatgcgcgtaatgatttctcccgctgggatgcggcgcaaagtttgctggcaacctacatcaagctgaacgtcgcgcgtcatcagcaaggtcagccgctgtctctgccggtgcatgtggctgatgctttccgcgcggtactgcttgatgagaagattgatccagcgctggcggcagaaatcctgacgctgccttctgtcaatgaaatggctgaattgttcgatatcatcgacccgattgctattgccgaagtacgcgaagcactcactcgtactctggcgactgaactggcggatgagctactggctatttacaacgcgaattaccagagcgagtaccgtgttgagcatgaagatattgcaaaacgcactctgcgtaatgcctgcctgcgtttcctcgcttttggtgaaacgcatctggctgatgtgctggtgagcaagcagttccacgaagcaaacaatatgactgatgcgctggcggcgctttctgcggcggttgccgcacagctgccttgccgtgacgcgctgatgcaggagtacgacgacaagtggcatcagaacggtctggtgatggataaatggtttatcctgcaagccaccagcccggcggcgaatgtgctggagacggtgcgcggcctgttgcagcatcgcagttttaccatgagcaacccgaaccgtattcgtagcttgattggcgcgtttgcgggcagcaatccggcagcgttccatgccgaagatggcagcggttacctgttcctggtggaaatgcttaccgacctcaacagccgtaacccgcaggtggctagtcgtctgattgaaccgctgattcgcctgaaacgttacgatgccaaacgtcaggagaaaatgcgcgcggcgctggaacagttgaaagggctggaaaatctctctggcgatctgtacgagaagataactaaagcactggcttgataaataaccgaatggcggcaatagcgccgccattcggggaatttacccctgttttctcaggcgagtttcagattcaccacgttgcatcacccgttgcaacacctccgcttccagctccgctaatcgcacgctccctaatcgacgcggacgggggatatccactgtcaaatccagaccaatttttccctcttcaattaacagcacccggtcagccatcgctaccgcttcgctcacatcatgcgtcaccaacagtacggtaaagccgtgctcctgccaaagactcacaatcaaatcctgcatctcgagtcgcgttaaggcgtccagcgccccgagcggttcatcaagcaacaataatcccggtcgatgaatcaacgctcttgccagcgccactcgctgtttctgcccgccagaaagtgcggcaggccattcccctgcgcgattctccagtcctaccgcagccaacgctcgacgtgcggcatcgcgccactggcctttaaggcctaacccaacgttatcaatcacgcttttccacggtagcagacgcgcatcctgaaacatcattcgcgtgtcttcctgaatttcagccagcggtgtggtgcccgctaacacatcgcctgcggttggcgtttccagacctgccagcaggcgcagcagggtacttttgccaccaccgctgcggcccaccaccgccacaaactgacctgccggaatatgtaaatccagttggttcaggacgatattttccgcgtaatgtttgcttactgcattgagcaacaatggcgtgccctggttcagacgagcagtattcataccgtggcctccttcaaatgataagccgggttccagcgcaaccagaggcgctctaacagctgcgcgctgacgtcagccagtttgccgagcagggcgtaaagaataatagcgactaccaccacgtccgtttgcaaaaacccccgcgcattcatcgccagataaccaatgccactattggcagaaatggtttcggcaacaatcagcgtcagccacatcaggcccaacgcaaaacgcacgccgaccataatactgggcagggcaccaggcaggatcacatggataaacagcggtatgccggataatccatagctacgcgccatctccaccaacccgcgatcgatattacggatgccatgccaggtgttgatataaatggggaatagcgtaccgagcgccaccagaaagatttttgcggattcatcaatgccaaaccacaaaatcaccagcgggatcagcgccagatgcggcacgttgcgcaacatctgaatactggtatccagcagccgttctccccagcgagatagcccgctaatcagtcccaaaatcaaccccaggcttccgccaatactaaagccaatcagcgcccgccaggagctgatcgccagatgctgccacagttcgccgctggcggagagcgtccagaacgccgtcaccactccttccggactaggcaaaatacgcgtgctcagccagccaacgctggaggccagttgccacaccgccacgatgcccaccggtaaaaaccagggggcaacgcgcaataaccacttcttcactggcgttgccattatttcttccttagctttgcgcgactttacgggggataaaatcattcgccaccgcttcgccttgcggattcagcggctgcggctggggaatttccgggatggcgacatccagaagcgggaacagcaactcgccaacccgatacgcttcttccagatgcggatagccgctaagcacaaaactgtcgatgccaagcgcggcatattcgttgattcgcgcagcgaccgtaggaccatcgcccaccagcgccgtcccggcaccgccgcgcactaagccaacgcccgcccataaattggggctgatctccagattgtcgcgcttgccgttatgtaacgccgccattcgctgttgccctacggaatccgtccgggcgaatgcggcctgtgctttggcgatagtttcatcatcaagatggctgattaaccgctcggcggcctgccacgcttcgtcgttagtttcacgaacaatcacatgcagacgaataccgaaacgaattttgcgtccatgcgcggcagctttcgcccgcacttgttcgattttctctttaaccagttccggcggttcgccccaggtgaggtagagatcaacctgttctgccgccagctcctgggcgacatcactgcttccgccaaagtaaagtggcggatacggctgttgaatcgccgggaagagcagttttgctccgcgcacatgaatatgtttaccgttgaaatcgacggtttctctctgcaataaacgccgccagacctgggtaaattccgcgctggcttcgtagcgctcgctatgatcaaggaacactccgtcgcctgccagctcttgtggatcgctgcctgtgaccaggttaaacaacgcacgtccattactgagacggtcaagcgtggcggcctggcgggcggcaacggtaggactggttacgctgggacgcagggcgacaagaaacttcagccgctgcgtcaccgggatcatgcttgcggcaaccagccacgcatcttcgcaggagcgccccgttggaattagcacaccggtatagccaagacgatccgccgcttgcgcaatttgttgcagataaccgtgatcaaccgggcgactaccttcttccgttcccagataatgcccgtcaccgtgggtcggtaaaaaccagaacatattcagactcataattgttttccttccagttgagtgggctgccagatgcgctggcgaatatcgacttttttcggcaccagacgattttcataaaacagatctgccgtttgctgctgtaaggcggcaacctcggcgttaaccggtttgatggtggtaggagggcgatgatctaagtaagaggcaatcaccggtgccggtaagcccatcgtttttgccagtaaagcgatgctttgctcgcgctggctgcgggttaacgcatcggcctcactaaaggttgccagtacgccctgaataaaagcgccgtttttttctgcatagggacgagctgccagataaaagcttccagtttgattgagatcggtgccgtctttcagcacccgcacgccgccctgtaataatgcagcagagtagtagggatcccagatagcccaggcgtcaacgttaccttgctggaacgcggcgcgggcatcagcgggcgtcaggtaagtgggttggatatcggtaaacttaagtccggcctgacgcagtgcacgcagtaaaaggttgtgactactggaacctttctgaaaggcaactttgtgacctttaagatcggctacggttttgatcgggctgttttctgccaccagaatcacttcggctttgggcttcggtggctcgacgcccacgtacaccaaatcagccccggcagcctgggcaaagattggcggaatatccccggtactgccgagatcaatactgccaacgtttaacgcttccaacatttgcggacccgcggggaactccacccaggagattttactttccggatagcgtttttccagtaactggtggctttttgccagcaccataccaatactgcctttctgatagcctatacgtaacgcttcagggctggattctgcagcaaccgcaaaagtagagacgctaagcaatcccgccagcgccagtttaatgatgttacgcatgggcattacctcgcagagacagaaggtcaggaacctgaacatcgcggcggtgcaatgcctgccagaaagtttctagcgcggtatcaagacgggtttgcagatttggcgtgaactggggtctgtgatggtaatcaattacttgactgtcatcggcaaacacgccgtgcaggatctcctgagctttcagtgcgcttaaaactggtttaagggcataatcgaccgccagcagatgggccacggtaccgcccgtcgccagcggtagcaccactttgccttgcaaagcgcgttctggcagcaggtcgagcagggttttcaacgcaccggaataggcggctttatacacaggcgtggcgacaatcagcccatcggcctgttgcagctgttcggtgaaggtcttgagtgccggactatcgaaacgagcataaagtagatcttccggggcgaagttttgcagattccagtgataaacctctacatccaggccatttagtttttcccgcgcatattccagcaaggagctggagcgagaaggaaagcgaggactacccgccagggtgatgacacgcatactctctccttataaccaattgttctttttttgttaacattgataacaattcggtcagtctgtcggagagacaagaaaattccaaatataaattttgtgtatctttttctgaaaataaactaaagaaagggctttatatatcacgcatatttatttattggatagtcattagatgttgaatcaatgaattactcgttcagttaatatttaaatattcatgaaatctataaattaaagatttgtcacttattggatttagtatgcttgatttaaatggcggacaattattgttattattaagtctaatgtcatttaaaggcattatcatatttacgaagagatcaggatgataacgatgaaaaaaagtgtattgacggcgtttataactgtggtatgtgcaacgtccagcgttatggctgctgatgataatgctatcacggatggcagtgtaacatttaatggtaaagttattgctccagcttgtaccctggtagctgcgacgaaagattccgtggtgactttgccagatgttagtgccacgaagttgcaaaccaatggtcaggtttctggcgtgcaaattgatgtgccaattgaattaaaagattgtgatactaccgtaacaaaaaatgcaacgttcacctttaatggcactgcggatactactcagattacagcgtttgctaaccaggccagttctgatgctgctacaaacgtggccctgcaaatgtatatgaatgatggtacaacggccatcacgccagacacagaaaccgggaacattttgttgcaggatggagatcagacgttgacttttaaagttgattatatcgctacggggaaagcgactagtggtaatgtgaatgcggtaacaaatttccatattaactattattaatagaactcattaattgttttattaattagtacccctccagtgttctggaggggatattcatattttttaagagtgactatttatgaaaacttgcataacaaagggaattgtgaccgtaagtttaacggcaatattactcagctgcagttccgcatgggcggcaggtaaaggcgggattggacttgcagcaacacgtcttgtttatagtgaaggtgaagagcaaattagtctgggtgtacgtaacaccagtccggatgttccttatcttattcagagttgggtgatgaccccagataataaaaaaagtgcagactttattattacaccaccgctatttgtgctgaatccggcaaatgagaatctgttacgcattatgtacattggagcgccgttggcgaaagacagagaaacccttttcttcactagcgtacgggcagtccctagtacaacgaagcggaaagagggaaataccctgaagattgccacacaaagcgtcatcaaacttttctggcgaccaaaaggtttagcgtatcccttaggcgaggctccggcgaaactgcgttgcactagcagtgctgacatggttacggtcagtaacccaacaccttatttcattaccctgacagacctgaaaataggtggaaaagtagttaaaaatcaaatgatttccccctttgataaataccaattttctctgccaaagggggccaaaaatagcagcgtaacgtatcgaaccatcaatgactacggggcggaaacgccgcaactcaactgtaaaagctaagccgtcttcagttaagagagcgagatgtatagaactcatcgacaacacagcctgttaagctctggtggagtgccaagctttattggtgggctggtggtgtttgtgagcgcagcgttcaatgcacaagctgaaacctggttcgatcctgcttttttcaaagatgatcccagtatggtggccgatttgtctcgtttcgaaaaaggacaaaaaataacgccaggggtttatcgtgtcgatattgttctgaatcagacaattgtagatacgcgcaacgtcaattttgttgagataacgccagagaaggggattgccgcctgtttgacgactgaaagcctggatgcaatgggtgttaatactgatgcgtttccggcttttaaacaactggacaaacaagcgtgtgtgccattggcggagattattccggatgccagcgtaacgtttaatgtgaataaactccgtctggaaattagtgtaccgcaaatcgccatcaaaagtaatgcccgtggttatgtcccccctgaacgttgggatgaagggatcaacgcgctattactgggatatagctttagcggggctaacagtattcatagcagcgcagacagtgattctggcgacagctattttctgaatttaaacagtggcgttaatttaggcccatggagattgcgcaacaatagtacatggagtcgtagtagtggccaaaccgcagaatggaagaatctcagcagctatttgcaacgggcggttattcctctgaaaggcgaactgaccgtaggtgatgattatactgcaggcgattttttcgatagtgtcagctttcgtggtgtgcagctggcgagtgatgacaacatgctgccagacagcctgaaagggtttgcgcctgtggtgcgtggtatcgccaaaagcaatgcccagataacgattaagcaaaatggttacaccatttaccaaacttatgtaagccctggtgcttttgaaattagtgatctctattccacgagcagcagcggtgatttgttagttgaaatcaaagaagcggacggcagcgtcaatagctacagcgtaccgttctccagtgtgccattactccagcgtcaggggcgaatcaaatacgcggtgacactggcgaaatacagaaccaatagtaatgaacagcaggagagcaaatttgcccaggccacgttgcagtggggcggaccgtggggaacgacctggtatggtggtggacaatatgctgaatattaccgtgccgccatgtttggtctgggatttaacctcggcgatttcggagcaattagcttcgatgcgacccaggcgaagagtacgctagcagatcaaagcgaacataaaggtcagagttatcgttttctgtatgccaaaacgctcaaccacttgggcactaactttcaattgatgggctatcgctatagcacgagcggtttctacaccctttccgacaccatgtataaacatatggatggctacgaatttaatgacggtgatgatgaagatacgccgatgtggagccgttattacaatttgttttacaccaaacgtggcaaactgcaggtcaatatctcccagcaattaggcgagtacggtagcttttatttaagtggtagccagcaaacttactggcatacggatcaacaggatcggctattacagtttggctacaacacgcaaattaaagatcttagcctggggatttcctggaactacagtaagtcccgtggtcaacctgatgctgatcaggtgtttgctctaaatttttccctgccgctcaatctgttgctccccagaagtaatgatagctataccaggaaaaaaaattacgcctggatgacctctaacaccagtatcgataacgaagggcacactacacaaaacctgggtttaacggagacattactcgatgacggtaacctgagctacagcgtgcaacagggatataacagcgaggggaaaacggctaatggtagcgccagcatggattacaaaggggcgtttgcggatgcccgagtgggctacaactacagcgataacggcagtcaacaacaactgaactacgctcttagtggcagtttagttgcccatagtcagggcattaccctggggcaaagcctgggggaaactaacgttctgattgcagcaccaggcgcagagaatactcgtgtggcgaacagcaccgggctgaaaactgactggcgcggatataccgttgttccttatgccacttcttatcgggaaaatcgaatcgcacttgatgcggcgagcttaaaacgtaacgtggatcttgaaaatgcagtagtcaacgtggttcccaccaaaggggcgttggttctggcggagttcaatgcccatgcgggtgcaagggtattaatgaaaacaagtaagcagggtataccgctgcgttttggcgcgatagcgacgctggacggcgtacaggctaatagcggcataattgatgatgatggcagcctctatatggcgggtttaccggcgaagggaacaataagcgtgcgctggggcgaagctcccgatcaaatttgtcatatcaattacgagcttaccgaacaacaaattaactctgcgattacgcgaatggatgccatatgcagataatctttggagaaaaatgcgtgagtttactacgactattttttgccgccgtcttaatgttatggtgcgctcaaaccgctgcttatagcgggcagtgtcatactactcaggggaatccgtatattggcgtcaattttggcgttaaaaccctggaggaagaagcaaatacggcaggggtagttaaagacaaattttatcagtggaacgaaagcaatgattattatgtttcctgtgattgcgataaagacaatgtcagaagtggccgatgggcattcgccgcggatagtccgttagtctatttaggcgacaactggtacaaaattaatgactatcttgccgccaaagttttattgcaggttaaaggcagttctcctactgcggttcctttcgaaaacgtgggcacagggggggatacccgatggcatatttgcgaccctggcggtcaacgtttaggtgggcagggggcaagcggtaatagcggtagcttttccctgaaaatattgcagccgttcgttggcagcgtcgtcattcctcctatggcgctggcgcgattatatgaatgctacaacatacccgcaggtgattcctgcacgactacaggtacaccggttttagtgtattacctgtctggtacgatcaatagtcttggcagttgttccgtcaatgccggagagacaattgaagttgatttaggtgatgtcttcgctgccaatttccgtgttgtagggcataaacctcttggggccagaacggcagaacttgcaattccagtcaggtgtaacacgggaaacgcgggattagttaatgtcaacctgagtctgacggcaaccacagaccccagctatccccaggcgattaagacgagtcgtcctggcgtgggcgtggtggtgaccgatagccagaacaacattatttcccctgctggtggaacattaccgctctctattcctgatgatgcagacagtatcgcgcgaatgaatgtctatccagtcagcacgacaggtgtaccaccagaaaccgggcgatttgaagccacggcaacggtgagaataaattttgattaacgcgtgaacgtatgaagaaaaaaacgatatttcagtgcgttatcttgttctttagcattcttaacatccatgtcgggatggctgggcctgaacaagttagtatgcatatttatgggaatgtggtcgatcagggctgtgatgtcgccaccaaaagtgcattacaaaatattcatattggtgattttaatatcagtgattttcaggccgcgaataccgtaagcactgctgctgatttgaatatcgatatcaccggttgtgccgctggtattactggcgcggacgtcctttttagcggcgaggctgacacccttgcgccgacactgctcaaactaactgacacaggcggaagcggtggtatggcaacggggattgccgtgcaaattcttgatgcgcaaagtcagcaagaaatcccgctcaatcaggtccagcctcttacgcccttaaaagccggggataacacactcaaatatcaacttcgttataagtccacaaaggcgggagcaacgggcggtaatgcgacggcggttctctattttgatctggtttaccagtgaaggagtgatgttgaaacggataatctggattctgttcttattgggattaacgtggggctgtgagctatttgcccatgatggcacggtcaacattagcggaagctttcgccgtaatacatgcgtgctggcacaggatagcaagcaaatcaatgtgcagttaggcgatgtcagcctgacacgtttttctcatgggaattatggcccggagaaatctttcatcattaatttgcaggattgcggaacagatgtcagcacggttgacgtcacctttagtggaacccccgacggagtgcagagcgaaatgttgtccattgaaagtggtacggatgcagccagcgggctggcaattgcgattctggatgatgcgaagatattgattccgcttaaccaggcgagtaaagactacagcctacatagcggtaaggtgccattaactttttatgcgcaattgcgacctgtcaatagcgatgtgcagagcggtaaagtgaatgccagcgcgacatttgtacttcattatgactaatacgtggaacagattggcgctcttgattttcgccgttttaagcctgctggtggcgggtgaattgcaggcaggagtggtggtcggcggaacgcgatttatctttccggcagacagagaaagcatatctattttactgactaataccagtcaggaatcctggcttattaacagtaaaatcaaccgcccaacgcgttgggccgggggggaagcgagcacagtgccagcaccattactggccgctccgccacttattctcctgaagcccggtacgacaggcacgttgcgcttgctgagaacggaaagcgacatcttgcctgtggatcgcgaaacgctatttgagttaagcattgccagcgtgccatccggcaaagttgaaaatcagagcgtaaaagtggcgatgcgcagcgtatttaaactgttctggcgacccgaaggtttgccgggcgacccgctggaagcttatcaacaattacgctggacacggaatagccagggtgtacaactcactaacccaacgccttattacattaacctgattcaggtgagtgtaaatggtaaagcgttaagtaatgtgggagttgtgccgcctaaaagccagcgtcagacaagctggtgtcaggcaatcgcaccgtgtcatgtcgcctggcgggcgataaatgattacggcgggttgagtgcaaagaaggagcaaaatctgccctgaaacaggttcggaaaacgtttgcgttttttttgccgcaggtcaattcccttttggtccgaactcgcacataatacgcccccggtttgcacaccgggaatccaggagagttcatgtactaccccttcgttcgtaaagcccttttccagctcgatccagagcgcgctcatgagtttacttttcagcaattacgccgtattacaggaacgccgtttgaagcactggtgcggcagaaagtgcctgcgaaacctgttaactgcatgggcctgacgtttaaaaatccgcttggtctggcagccggtcttgataaagacggggagtgcattgacgcgttaggcgcgatgggatttggaagcatcgagatcggtaccgtcacgccacgtccacagccaggtaatgacaagccgcgtctctttcgtctggtagatgccgaaggtttgatcaaccgtatgggctttaataatcttggcgttgataacctcgtagagaacgtaaaaaaggcccattatgacggcgtcctgggtattaacatcggcaaaaataaagatacgccagtggagcagggcaaagatgactatctgatttgtatggaaaaaatctatgcctatgcgggatatatcgccatcaatattagtagcccgaataccccaggattacgcacgctgcaatatggtgaagcgctggatgatctcttaaccgcgattaaaaataagcaaaatgatttgcaagcgatgcaccataaatatgtgccgatcgcagtgaagatcgcgccggatctttctgaagaagaattgatccaggttgccgatagtttagttcgccataatattgatggcgttattgcaaccaataccacactcgatcgttctcttgttcagggaatgaaaaattgcgatcaaaccggtggcttaagtggtcgtccgcttcagttaaaaagcaccgaaattattcgccgcttgagtctggaattaaacggtcgcttaccgatcatcggtgttggcggcatcgacagcgttatcgctgcgcgtgaaaagattgctgcgggtgccagtctggtgcaaatttattctggttttatttttaaaggtccgccgctgattaaagaaatcgttacccatatctaattatttcttcgaattcctctttataagataatcagggctttattttcagccctggttgttttatattcatcgctgttgcttatttagacattttgtacttttattgttgaggttattaagcgaagcgacaatggattgtgttgctgcggttttatagggtaggggagaggcagatgcgaattaaaccagacgataactggcgttggtattacgatgaagagcacgatcgaatgatgctcgatttagccaatggtatgctatttcgcagtcgttttgcgcgcaagatgttgactccagatgccttttctcccgcaggcttttgcgttgacgacgccgcgctctatttctcttttgaagaaaagtgccgcgattttaatttatctaaagaacaaaaagccgaactggtgctgaatgcactggtagcaattcgctatctcaaaccgcaaatgccgaaaagctggcattttgtttcccatggtgaaatgtgggtgcccatgccgggcgatgcggcctgcgtttggttgagcgatactcacgagcaggtcaatttgctggtcgttgaatctggcgaaaatgccgcactatgcctgctggcacaaccctgcgttgttattgcgggtcgcgcgatgcagttgggcgacgccattaaaatcatgaacgacaggctgaaaccgcaggttaatgttgacagcttcagcctcgaacaggcagtttaacgcgccaacttaagtgcagtcttcggtacacagctacagcaaagaatggtgccatcatcgcccattgcactttttttcagcggcgtgacttcgccttctaaaagctgaacacggcaacttccacaaatgcccgcgcggcaagaataagggatacgaattccctgattttctaattgctccagcaacacctgttggttatttccacgaaatgcctgtccctgccagtcaatatctacatttgcgtccggttgttgcgtgatgttggcggtatcatcagcggcagctgcgccgtaaatttttgccggagccgttgccagaatttccacctcatcgccaacgcgaatcacgccgctattacgggcaattaaattctgaccaaaatcgacatcgccgttatcctgggcagtgcggaaagattgcaatgtttttaatggttcgcctgccggatgtttttgccctttttctgggctgacggtggtgaaaatacagcggctacaaggtttaaccacatcaaacaccacatcaccaatgcgaatcactttccagcgatcttcttcccaggcactcgcgccggaaaccaccagattggggcggaattgctccatttttacactggccggacaacgttgttggagatcacgtaagctggcttcgttagcaagaaggtaaggatagccatcagcaaaactcagaggtacagtgttgtggcgtttcacgcgccgggtcatttgtggccccacccagcgtaattgcacttcgcgggagaaaaatccacttagccatttgttgatcgcgtctggcgcaattcgcgcggtaaaatgtgtgccccaaacttcggttggtgcgtcttgtgtggcgaaatcagcaaaacgaacatatgcgctactgccatctggtgcggtgagatgcaagccatcatgcacaggactaggagtaaaccgtaccatctggggaaactggcgagcggtaataaacgtaccgtcaggttccgtgatcataaagatgcgatcgaaggccagaccactgacatctgccagagcatgtgtaagaccaatgccgcgcatgcttttaacaggatgaataaaaagccggattaatgtcgccacggtgcggtcctcaaatgaaaataagccctcaactttatgacatgacgcgcttattagctataatgcgcaacaattttcttagcgcctgtcccattaggctattttatttgtcagtttggccctgggttatgctcgaaatcctcacgtacttgtgtacgctccggtttctccgcgctgtccatgtccagactgactgcaacaattacgcctactgcggtaggctcttagagtaaaagtgacgatatgaattctctgtttgccagtacggcccgtgggctggaagagctgttaaaaactgaactggaaaacctgggggccgttgaatgccaggtggttcagggtggggtccatttcaagggcgacacacggcttgtttaccagagcctgatgtggagccgcctggccagccgtattatgttgccgctgggcgagtgtaaggtttacagcgatttagacctctatctcggtgttcaggcgatcaactggacagagatgtttaatcctggcgcgaccttcgctgtccacttcagtggtttgaatgacaccatccgcaacagtcagtacggcgcgatgaaagtgaaagacgcgatcgtcgatgctttcacgcggaaaaatctgccgcgtccaaatgttgatcgcgatgcgccggatatccgcgttaacgtctggctgcataaagaaaccgccagtatcgctcttgatctgagtggtgatggtttacatctgcgtggctatcgcgatcgtgctggtattgcgccgatcaaagaaaccctggcagccgctattgtgatgcgatccggctggcagccaggaacaccgctgctcgatccgatgtgtggttccggtacgttgctgattgaagcagcgatgctggcgaccgatcgcgcaccaggcttgcaccgtgggcgttggggctttagcggctgggcgcagcatgatgaagctatctggcaggaagtgaaagcggaagcgcaaactcgcgcccgtaaaggcctggctgagtatagctctcatttttacggtagcgacagcgacgcacgggtgattcaacgtgcacgcactaacgcccgtcttgcggggattggtgaactgatcacctttgaggtgaaagatgtcgcgcaactgaccaatccgctgccgaaagggccgtacggcacagtgttgagcaacccgccatacggggaacgtctggacagcgaaccggcgctgattgcgctgcatagcctgctgggtcggatcatgaaaaaccagtttggtggctggaatctctctttgtttagtgccagcccggatctgctaagctgcttgcagctgcgtgcagacaaacagtacaaggcgaaaaacggcccgctggactgcgtacagaaaaattaccacgttgccgaaagcactccagacagcaaaccggcgatggtagcggaagactacaccaaccgcctgcgtaagaacctcaaaaaattcgagaagtgggctcgccaggaagggattgaatgttaccgcctgtatgacgccgatctgccagaatataacgttgccgttgaccgttatgccgactgggtggtggtgcaggagtatgcgccgccaaaaactattgatgctcacaaagcgcgtcagcgtctgttcgatattatcgctgcaaccattagcgtactggggattgcgccaaacaaactggtgctgaaaacccgtgaacgccagaagggcaaaaaccaataccagaaactgggcgagaagggcgagtttcttgaagttaccgaatataacgctcacttgtgggtgaacctgacggattatctcgatactggtctgttcctcgatcaccgcatcgcccgtcgtatgctcggtcagatgagcaaaggcaaagatttcctcaacctgttctcttataccggcagcgccaccgtgcatgcgggattaggcggtgcacgcagcaccaccaccgtggatatgagccgtacttatctggaatgggcagaacgcaacctgcgtctgaatggcctgaccgggcgtgcgcatcgcctgattcaggccgattgcctggcgtggctgcgtgaggcaaatgaacagttcgatctgatctttatcgatccgccaaccttctctaacagtaaacgaatggaagatgcgtttgatgttcagcgcgatcatctggcgctgatgaaagatttgaaacgtctgctgcgtgcaggtgggacgatcatgttcagcaacaacaaacgtggcttccgtatggatctcgacggcctggcaaaactgggactgaaagcacaagaaattacgcaaaaaacgctctcccaggatttcgcccgtaaccgccagatccacaactgctggctgattaccgcagcctgaaaggaatagtaatgagtttaatcagtatgcatggcgcatggctgagcttcagcgacgcgccgcttctcgataacgcagaactgcatatcgaagataacgaacgtgtttgtctggtgggccgcaacggcgcaggcaaaagcacgttaatgaaaatcctcaaccgtgaacaagggctggatgacggtcgcattatttacgagcaagatttgattgtagcgcgtctgcaacaggatccgccgcgtaacgttgagggtagcgtttatgatttcgttgccgaaggcattgaagaacaagcggaatatctgaaacgctatcacgatattagccgcctggtgatgaacgacccgagcgagaaaaatctcaacgaactggcgaaggttcaggaacagctggatcaccacaacctgtggcagctggaaaaccgcatcaacgaagtgctggcgcaactggggttagatcctaacgttgcgctgagcagcctttccggcggctggttgcgtaaagcggcattaggacgcgcgctggtgagtaatccgcgcgtgctgttgcttgatgaaccgacaaaccacctggatattgaaaccatcgactggctggaagggtttttgaaaactttcaacgggacgattattttcatctcccacgaccgtagctttatccgcaatatggcgacgcgcattgttgatctcgatcgcggcaagctggtgacctatccagggaattacgaccagtacctgctggaaaaagaagaagccctgcgcgtggaagaattacaaaatgccgagttcgatcgcaaactggcgcaggaagaggtgtggatccgccaggggatcaaagcacgccgtacccgtaatgaaggccgcgtacgcgccctgaaagcgatgcgtcgcgaacgtggtgaacgtcgcgaagtgatgggtaccgcaaagatgcaggtggaagaggccagccgctccggtaaaatcgttttcgaaatggaagacgtttgctaccaggttaacggtaagcaactggtgaaagatttttctgcccaggttctacgtggcgacaaaattgccctgattggtccgaatgggtgcggcaaaaccacgctgctaaaactgatgctcggtcagcttcaagcggacagcgggcgtattcacgttggcaccaaactggaagtggcttatttcgatcagcaccgcgcggaactggatcccgataaaacggtgatggataaccttgccgaaggtaagcaagaggtgatggttaacggcaagccacgccacgtattgggctatttgcaggactttctgttccatccgaaacgggcgatgacgccggtacgtgcgctttctggcggtgagcggaaccgcttgctgctggcgcgtttgttcctcaaaccaagcaacttattgattcttgacgaaccgaccaacgatcttgatgtcgaaacgctggaactgctggaagaactgatcgacagctatcagggcacggtattgctggttagccacgatcgtcagtttgtcgataacaccgttacagaatgttggatcttcgaaggcggcggtaaaattggtcgttatgtcggcggttatcatgatgcccgtggtcagcaagagcagtatgtggcgctcaaacagcctgcggtgaaaaaaaccgaagaagccgccgcggcaaaagcagaaactgtaaaacgcagcagtagcaaactaagctataaattgcagcgcgaactggagcagctaccgcaattgctcgaagatctggaggcgaagctggaagccctacagacgcaagtggcggatgcttccttcttcagtcagccgcatgagcagacgcaaaaagtgcttgctgatatggctgctgcagagcaggagctggagcaagcctttgaacgctgggagtatcttgaagcgttaaaaaatggtggctgatcgcaaaatagtcgatttaaacagagacagctgacaacggtaaaattgcctgatgaactgggtttatcaggcatgaaaaccaacactttgttagtcatctgtaaaatagcgcatcattaaggagtaccaatgtgcgaacatcatcatgccgcgaagcacatcctgtgcagccagtgtgacatgctggtggcgttaccgcgccttgagcatggtcagaaagcggcatgtccccggtgtggcacaacgttaaccgtggcgtgggatgcccctcggcagcgtcccaccgcctatgcgttggctgcactgttcatgctgttgctgtccaacttgtttccttttgtgaatatgaacgttgcaggagttaccagtgaaattacattactggaaattcccggcgtgcttttttctgaggactacgccagcctcggcacctttttcctgttgtttgtgcaactggttcccgcgttttgtctgataaccattctgttactggtgaatcgcgcggaattaccggtccgtttaaaagagcaactggcacgggtgctttttcaactcaaaacctggggaatggcggagattttcctcgcgggtgtgctggtcagtttcgttaaactgatggcttacggcagcattggggtaggcagcagctttctcccctggtgtttattttgtgtcctgcaactgcgcgcttttcagtgcgttgatcgtcgctggttatgggacgacatcgccccgatgccagaactgcgccagccgctaaaaccaggcgtcacggggatacgtcaggggctgcgtagctgctcctgttgtacggcaatccttcctgctgatgaacccgtgtgcccgcgttgtagtaccaaagggtacgttcggcgtagaaacagcctgcagtggacactcgcgctgcttgtaacgtccatcatgctgtatcttccggctaatattttgcccatcatggtgacggatttattaggcagcaagatgccgagcacgattctcgctggggtcattctgttatggagcgaaggctcttatcccgtcgctgcggtgatctttctggccagtattatggtgccaacgttaaagatgatcgccatcgcgtggctgtgttgggatgccaaagggcatggcaagcgcgacagtgaaagaatgcatttgatttatgaagttgttgagtttgtaggccgctggagcatgattgacgttttcgttatcgcggtgctcagcgcgctggtgcgtatgggaggtttaatgagtatttatccggcaatgggtgcattaatgtttgctttagtcgtcataatgacaatgttttctgctatgacgtttgacccgcgtttgagctgggatcgtcaacctgaaagtgagcatgaggagtcctgacagtatggaatctaataatggggaagccaaaatccagaaagtgaagaactggtctcccgtgtggatatttcctatcgtcacggcgctcattggggcctgggttcttttttatcattacagccatcagggaccggaagtgaccctgatcaccgcgaatgcggaaggaattgaaggtggcaaaaccaccattaaaagccgtagcgttgacgtcggcgtggttgaaagcgccacactggctgatgatttgacgcacgttgaaatcaaagcgcggctgaattccggtatggaaaaattgctgcataaagacaccgtcttttgggtggtgaaaccgcagattggtcgcgaagggattagcggcctgggaacgctgctgtctggagtttatatcgaactgcagccaggcgcgaaaggcagcaaaatggataaatacgatttgctggacagcccaccgttggccccgcctgatgcgaaaggtatccgtgtgattctcgatagcaaaaaagccgggcagctcagcccaggagatccggtgctgttccgtggctatcgggtaggtagcgttgaaaccagcaccttcgatacacaaaaacgcaatatcagctatcaactgttcatcaatgcaccttatgaccgactggtgaccaacaatgttcgcttctggaaagatagtggcattgcggttgatctgacgagtgcagggatgcgtgtggagatgggcagtttgacaacgctgctgagtggcggtgtcagctttgatgtgccggaaggtctggatttagggcagccagtggcaccgaaaacagctttcgttttgtatgatgatcagaagagcattcaggatagcttgtacaccgatcacattgattatctgatgttctttaaagatagcgtacgcggtctgcaaccgggagctccggtagagttccggggtattcgcctgggtaccgtaagcaaagtgccattctttgcgccgaatatgcgtcagacatttaacgatgattaccgtattccggtactgattcgtatcgagccagagcggctgaaaatgcagcttggcgaaaatgcggatgttgttgagcaccttggcgaattgttgaaacgtggtttacgcggaagcctgaaaaccggaaacctggtcactggtgcactgtatgttgatctcgatttctatccaaatacgcctgcaataaccggtattcgtgaatttaatggttatcagattatcccgaccgttagcggcggcctggcgcaaatccagcaacgactgatggaagcgttggataagatcaacaaactgccattgaatccgatgattgaacaggcaaccagtacgctttctgaaagtcagcgcacaatgaaaaacctgcaaacgacgctggatagcatgaacaagatcctcgctagccagagcatgcagcagttgccgacggatatgcagagtacgttgcgtgaattgaatcgcagcatgcagggcttccagcctggctccgcagcctacaacaagatggtggcggatatgcagcgccttgatcaggtgttgcgagaactgcaaccggtgctgaaaacgttcaatgagaagagtaacgcgctggtatttgaagcgaaggacaaaaaagatccagagccgaagagggcgaaacaatgaaaaagtggctagtgacgattgcagcactgtggctggccggatgcagctccggcgaaattaataaaaactattaccagttacctgtggtgcagagcggtacacaaagtaccgccagccagggcaatcgtctgttatgggtagagcaggtcactgttcctgactatctggcggggaatggtgtggtttatcaaaccagtgatgtgaagtatgtgattgccaacaacaacttgtgggccagcccgttggatcaacagttgcgcaacaccctggttgccaacctgagtacgcaactgcccggctgggtggttgcctcccagcctctgggaagcgcccaggacacgctcaatgttaccgtaacggagtttaacggtcgctatgatggcaaggtcattgtcagtggtgagtggctgttgaaccaccagggacaactgatcaaacgtccgttccgtctggaaggagtgcaaactcaggatggttacgatgagatggttaaagtgctggccggtgtctggagtcaggaagccgcttctattgcacaagagataaagcgtctaccttaattataaagatttgtaaatataaccgtctccggtatgttgcctgaggcggtttttttgtctctaacgtgcggaaaaatttgttcctcttcacattttttgtacaaccgacatgcccgtgtagctcacaaatatgacagtggcgtgaattttgcgcattgacggcagttatgattcgcggtattgcttaactgtgattgcacatttagtaatcactgttttcttttccaccagaaaccagtatgagggaaacgaggcatgaagagacaaaaacgagatcgcctggaacgggcacatcaacgtggttatcaggccggcatcgccggacgcagtaaagaaatgtgtccctatcagacgctgaatcaaaggagtcaatggctgggaggctggcgagaagccatggcggacagggtagtaatggcctgattctgtctctttaaaaagaaacctccgcattgcggaggtttcgccttttgatactctgtctgattataatcagaaggcagacgtatcctggaacagaccgactttcaggtcgctggcggtatagatcagacgaccatcaaccagcacttcgccatccgccaggcccataatcagacgacggttaacaatgcgtttaaagtgaatacggtaggtcacttttttcgctgtcggcagtacctgaccagtgaatttcacttcgccaacgcccagcgcgcggcctttaccttcgccgcccagccagccgaggtagaaccctaccagctgccacattgcgtccaggcccaggcatcccggcataaccggatcgccaataaagtggcatccgaagaaccacagatccggattgatatccagttctgcttcaacataccctttgtcgaagttaccacccgtttcggtcattttgaccacacggtccatcatcagcatgttcggtgctggcaattgcgggcctttagcgccaaacagttcaccgcgaccagaggcaagaaggtcttcttttgtataggattcgcgtttatctaccatgttctctgtaagccttattttattgaagcacgcaggatagctaacacgtgtacgctgaacaagtccgatcagttcggaataaaccagttcagccaacgtaatggccatggaaaacggtgacgtccttcctgttggcttgcttgcgcgatacgttcctggatggtttgcatcagcgtcgtttggccttcgccatcccacaccagatttaataataacggcagtgcgtcagtcacatcgtctactgcccagatggtgaatttgccttcttctaccgctttcaccagttcactgtgaagacttaaatggcgaacgttagctgtggggataatgacaccttgtttcccggttaactcacgttgctggcaaatagcaaagaagccttcgattttctcatttaaaccaccgaccggctgggcgcgaccgaactgatcgacactacctgtgatagcgatactctgattcaccggcacatcggcgagggcgcttatcagggcgcagagttcagccatgctggcactatctccatcaacttcactgtaactctgctcaaatgtcaggcttgcactgaaggggatctgttgctcaagctgtagttcgctcatcaggaacgcttgcatgatcatcatccctttcgcatggatattgccgccaagctccgctttgcgttcgatgtcggtgaattcaccatcgccaatatgcacaacgcagctaatgcgagaaggttcgccaaaagcgcgtggatgacccggaaattcaatgacgctaagggcgttaatttgcccgatgcgttcgccttcggtttcaatcaggatttgctcctgaaggatctcatcctgcatacgttcagcgaggaaaccttcgcgccattcacgctgctgcagcattaagtttagctgctcgccggagaaggtgtcgccatcacacagggaggcgacctctttacactggcggaggatccactgcgggctaagcggaagtgtttcttgttcaccggtgtagcgtgctgcttcgcggataagtatcggccaggcatccgctcccggtgcaggtaagtgattatgtctggcggtaaatgtcacccagcgacaccactgggttacactctccgcatcgacaatctgcagagtatcttcaaattcgctataaatagcctgctcactaagctctggctccatctcctggaaatcagccaaactttcgcgttcgcctaccagaatgactttcagcttcaatggcatgctaggcacagagacggggagagggcggctctcatcaaacgcaacccagtcaaaacgctcgcggttaacgatatttttcagccgcatccacagcagaggttgcgccagcagtgtacgcaaagagataatgagaataccgccatttgcctgatgcaccagaccaggctgcagggtaatgtcgccattaaactggcgcaggcagccaaagagttgctccgcttctacccagtcggcagcgacaacttgcgttaaagtcgcaaaattatcatctgcactcactgcgtgacgtaagcggatggagtggccggaaacctcatagtgaccgcccaccagttggcctgcatcgctttgtagcgtacgcgcggcattggcaataagattcagatactcagactcttccggggccttcgccagcataaaagaggaggatgctcgcgtatgcagcaactgctccagcgcaaattgcagccgcggttgagtatcactgaataaaggatcgttttcgtcaatcaaatgtggctgagcaaatatttcctgatagctatcggtatcaggaaccaggtcacgccatgcaagtttcgtaatggtcaaagttgatgttttttagtctgttgtcaaagccgcgattataccgtaaccggcactacagcacacgtagaaagcaccgacaatactcctggcatgggcgttaaagctcacaggatggagattcttttcttcactggcctaaaaagctgatattctgtaaagagttacacggtaacattgagatcgctatgaaatatcaacaacttgaaaatcttgaaagcggttggaaatggaagtatctggttaagaagcatcgcgaaggggagttaatcacccgttacatagaagccagtgccgcccaggaagccgtcgatgtgttgctcagcctggaaaatgaacccgtgctggtaaatggctggattgacaagcatatgaatccggaactggtcaatcgcatgaagcaaaccattcgggcaagacgaaagcgccattttaatgcggaacaccagcatacgcgcaaaaaaagcatcgatctggaatttattgtctggcaacgtctggctggtcttgcgcagcgtcgcggtaaaacgctttctgaaacgattgttcagctgattgaagatgcggaaaacaaagagaaatacgcgaataaaatgtcttctctgaagcaggatctgcaggcattgctgggtaaggaataactgacgaaagtcagttcaatttactaaaggcaaaaaaaaccccgcagcagcggggtttttctaccagacgagaacttaagcctgcggctgagttacaacgtctttgatacctttaacttcgatctctacgcgacgatccggagccaggcagtcgatcagtgcagcacgctgtttcacgttgtcacaggtgttgccagtaaccgggttggattcgcccataccacgtgcggagatcttgtctgccgggatacctttggagatcaggtaatcaacaacagactgagcacggcgctcggacagaccctggttgtaagcgtcagaaccgatgcggtcggtgtaacccagaacaactacggaaccgtctttcggatccaggttgctcagctggctgtacagctgatccagagcagcctgaccttccggtttcagggttgctttgttgaagttgaacagaacgtcagacttcagagtgaagtgcttggtctgtacttccggtgccggagctggagccggagcaactactggagctgcttcgccctgaccgaaacggtaggaaacacccaggctcagcatgccgttgtccggacgagtgccgatggtgtgtgcgtcaccgatgttgttggtccactggtattccagacgggtagcgatttcaggagtgatcgcgtactcaacaccgccagcgaagaccggagaaacgccggtgtcgtggtttttaccataaacgttggatttagtgtctgcacgccataccatgccacccagacgagtgtagatgtccaggtcgtcagtgattgggtaacccagtttagcggtcagttgaacgccctgagctttgtatgcaccgttttcaacgctgcctttgtacggcatacgacctaaccagtcgtaacccatttcaaagccaacatacgggttaacctggtaaccaccaaaagcaccagcgcccagttggttttcatgggtcgggccattgttgttgatgaaaccagtgtcatggtactgggaccagcccagtttagcaccagtgtaccaggtgttatctttcggagcggcctgcgctacggtagcgaaaccagccagtgccactgcaatcgcgatagctgtctttttcattttttgcgcctcgttatcatccaaaatacgccatgaatatctccaacgagataacacggttaaatccttcaccgggggatctgctcaatattaactctaccgatatcttcggcttatgccgagcacccctggcgatgtaaagtctacaacgtagttgaaaacttacaagtgtgaactccgtcaggcatatgaaaaaaaagtcttgtataaggtatgtttaatcttttttgtcagcgacaatttacagaagagaatcgcggaaaccgcttcagacaagcctccgcaaggaaaattagtcacgactgaaagcattggctgggcgacaaaaaaagttccaggattaatcctaaatttacttaatgatacaaattagagtgaatttttagcccggaaagttgtctcgtggcgtgagaggatgcgcttaccggacgcataataaaccccatagcgttaccttcatttgccgcatcaacaagttcagcatgctcttcttcagtcaaatcatctgccaaccaaccgatcaccacactgtaattgcccgtgcgtaaagcgcgaaccatactctccacagtgtggcaaggggagagctggctaatctgcattactttcgttaagggtagcccagatgcctgaacccattcccgactcagtttttgttgcggtgttaaccagagttgccagcggctttgctgaccgagttgctgtaacaatggcaacagtagaagttgcgtcatcatgggctgatcttcgcgatagacaacttcactgataagcccggctgtagtgttttccgtagagacacgcgcaattttacttgctgcggaactgaagctgctagaacgatgtgcatagccactagtgtacataatcaatccagcccctgtgagttactgtatggatgtacagtacatccagtgacaacaaagatcaaccctattttcggaaagagcctcgcaaattttgtcgttggtgacgggaaaacataaattaatcttgccccttaagaataagttgcctattttcgtagttaacggatccgttaatgtgaatcattcttttatgttatgattttaaaaggaattttatgaaaagcctctcctataagcggatctataaaagtcaagaatacctggcaacgttgggcacaattgaataccgaagtttgtttggcagttacagcctgaccgttgacgacacggtgtttgcgatggtttctgatggtgagttgtatcttcgggcttgtgagcaaagtgcacagtactgtgtaaaacatccgcctgtctggctgacatataaaaagtgtggccgatccgttaccctcaattactatcgggttgatgaaagtctatggcgaaatcaactgaagctggtgcgtctgagcaaatattctctcgatgcagcgctgaaagagaaaagcacgcgcaatacccgggaaagactgaaagatttgcccaatatgtcttttcatctggaagcgattctcggggaggtggggattaaggatgtacgggcgttacgtatacttggggcaaaaatgtgttggttgcgactgcggcagcaaaacagtctggtgacagaaaagattctgtttatgcttgaaggtgccattatcggcattcatgaagctgcgctcccggtggcacgccgccaggagcttgcagaatgggctgactctcttacgccgaaacaggagtttcctgcggaacttgagtaattacgcgctaacaggagtttcctgcggaacttgagtaatctggcgttgcagacgaccaatctcaggcagtaatgcaatcaataatccaacttgttgtacgaccagaggttctttgctgtctgcccgtggttcaagttgctgcatccgctgtttcaggctagctaatgcctcattgacgcgttcttcatcagcaggttgatgatgtaacgcgtcatcaacatagcaaactgcgtcatcaagaaacgccagaatttcaggattagttaactgctcccggtgagcaccgagggcactgatatagctggtaaacgtatggttaaggcacagcaaccgaaacgcggcttcgcgaatttgcggggtaacgttcggctcgctggacatattacttaccacgctcgccagctcagcatcacggttgtgtgcatcgcggcgggcaatacgatacgccagacggttatcacgcccctgatggtattgctccagtatggcatcgagataccgacagttggcctctgtggcacgttcgagcatgcgcggcagattgcgaaactgccagtcaggccagatgtagctcactgccgcccacgcaatggcacaaccaatcagcgtatcgattacgcgaggtaacgctacttcaaaaccttcacccagtaagttaaaacacagtagcaccaaaagtgtgatgaacatcgttgcatgagcgtattgcacgttacggaaggcaaaaaagagcacgccggtaataaccagcagcaccagctgcccttccagacttggcacaaaccacagcacaggaatgccaatggcgatacctaccagcgtaccaataatccttaacttcaggcggtggcgcgtggcgttatagtttggctggcagacaaacaaacttgtcagcaagatccaatacccgtgatgcattccggttatctgaatgatggcgtagccgaagcacaacaccaggctcattcttaccgcatgacggaagagggcggattccggcgtgaagtgacggctaagacgcagccagatatcactcaacccgtgcgggctgtcatcagcgagctcattttcgtcattattatggggtagtgcctgggcctgttcactttcaattgttgccagttgggcatcaatggcgcgtaaattgttcagcaaaaatcccagtgttttgagtaaatcggcgggtgcgccgttatcgcgcatccgctccagcgcagcatcaatatgcgtaaaagcgcgctcaaaatgcggatcatgttgataaggctgacgcaacaaaatacagcgactcagttgctggcacgcctggccctgcatgctcatcagccgctgaaaacggaacagcacgtcgctgtggcgaaaatgttcacgcaatgtttgatactgaatatgagaagagctggcacgctcgtgaatatcctgtgcgacaaagtaataatgcagcgtgcgacgcgttccccgttgaccacgatcgccacgtaagcgggtcagcaggctgagtttcgtctgattcaatgtcgccatcagcagaccgttggcgagagccaaatcgtacagcggtgcctggctttgatcttcaatatcaggatcaaacatgcggctcttgagctcaagataacgcgccagttgttcatagcaacgcgccaggttgtcctgcagcgggcggaccgggaacagcagatgaccaataagtgtcaggacgttgtaccagacggcaccggccagcagatacatcggctgctgataccagtgctcatacagacttgttcccaacatagtgtaaatggcgatcagcaatgcaccgaaggcaattgttgcatagcgttgacccagaccgccgagcaaaatgaagccgctggtagagagcgttaagccaatcgcaaatagccagggccagggaaacagcaattctacactggcgctggcgataaaaaagcagaacagcgtaatgatgaggttacgcaaacgtcccgccagtcggtcatcgagatcggtcagcgccgctgccaccatccccagcgttagcggaatcgtcagttttacatcacccagccaccacggaaacgctgtggttccacaaagcgcaataaaaatacgcgcgtaatacagccaggcgctgttccaggtatagcgtttgagcaaaggacttagcataaaggccatattagtggattattcaaaacgacgacgtgcattggcttcacgcgcagcttgcgctgtttctacgcttaccacgcgacgaccaaccggccatagtgcaatagcggcaattttaaagttcgcaatgccgacaggaatgccaatgatactaatacattgtgcgatgcccgttgcaatgtgcatcaggcataaccaccagccaaagaaaatcagccagaaaatattcaataccgtaccgccagtattcagcagcacatttttgccagccgggttcagttcatcgacatgaatagcttcattgccataaggcaccagagacagtttagtgatctcccagcaggatcgtgtcagcggtaaggtaaaaatcagcacaatactgaccagagtcgccaacagccagcccagagtggtggcaaatccgccaagcacaaagttcagaatgttcaaaacggtacgcataaaacctcgctttactgtggttttcagtaatgggcggcaattgtaacgtttttttgggctggagcacgttttctctgacggttacactgataagaaataatttcgtgtggatctacagagtcatggaactgaaagcgacaacgcttggaaaacgtctggcacagcacccttacgatcgggcggtgatcctcaatgccgggattaaagtctccggcgatcgccacgaataccttattcctttcaatcaattactggcgattcactgtaagcgcggtctggtatggggcgagctggaatttgtactgccggacgaaaaagtggtgcgtctgcacggcaccgaatggggcgagacgcagcgtttttaccatcatcttgatgctcactggcggcggtggagtggcgagatgagcgaaattgcgtctggtgttttacgccagcaactggatttgattgccacgcgcactggggaaaataaatggctgacgcgtgagcaaacctctggcgtgcagcaacaaatccgccaggctttgagcgcgttgccgttgccggttaaccgactggaagaattcgataactgccgtgaggcgtggcgtaaatgtcaggcctggttgaaagatattgaaagcgctcggttgcagcataaccaggcgtataccgaagccatgcttaccgagtatgcggattttttccgccaggtcgagtctagtccgctgaatccggcgcaggcccgggcagtcgttaatggcgagcattctctgttagtgctggcaggtgcaggaagcggaaaaacgagcgtgctggtggcccgtgcaggctggttgctggcgcgtggtgaagcgtcccctgagcaaattttattgctggcgtttggtcgcaaagccgctgaagagatggacgagcggattcgcgaacggctacataccgaagacattaccgcacgcacgtttcatgcgctggcgctgcatattattcagcagggcagcaaaaaagttccgatagtcagcaaactggaaaatgataccgctgcccgtcatgaactctttattgctgagtggcgcaagcaatgcagcgaaaagaaagcgcaggcgaagggctggcggcaatggctgacggaagaaatgcagtggagtgtgccagaaggtaacttctgggatgatgaaaaattacagcgtcgccttgcctctcgcctcgatcgctgggtaagtctgatgcggatgcacggtggtgcacaggcagaaatgattgccagtgcacccgaagagattcgcgatctgttcagtaaacgtatcaagttgatggccccgttattaaaagcctggaaaggtgcgctgaaggcagaaaacgctgtcgattttagcggccttattcatcaggcgattgtgattctggagaaaggtcgctttatcagcccgtggaagcatattctggttgatgaatttcaggatatcagcccgcagcgggcagcgttgttagcggcattacgcaagcaaaacagtcagacgacgttgttcgctgttggtgatgactggcaggcgatttaccgattcagcggtgcgcaaatgagcctcaccaccgctttccatgaaaactttggtgaaggcgaacgctgtgatttagacacgacttaccgttttaacagtcgtatcggtgaggtggcaaaccggtttattcagcagaacccaggccagctgaaaaagccgctaaacagcttaaccaatggagacaaaaaagccgtcacgttattggatgagagtcaacttgacgctttgctggataagctctctggttatgccaaaccggaagagcgcattctgatcctggcgcgttaccatcacatgaggcctgccagcctggaaaaagcggcaacacgctggccgaagttgcaaatcgactttatgaccattcatgccagcaaagggcaacaggcggattacgtcatcatcgttggcttgcaggagggaagtgatggttttccggctgcggcgcgggagagcattatggaagaggcgctactgccaccggttgaggatttcccggacgctgaagaacggcggttaatgtacgtggcgctgacccgggcacgccatcgggtatgggcactgtttaacaaagagaatccctctccctttgtggaaatactgaaaaatctggatgtgccggtggcgagaaaaccgtaagaaacaggtggcgtttgccacctgtgcaatattacttcagacggtccgcgagataacgctgataatcggggatcagaatatcgaccgcgtcgttgaaatgcgggctctggattatgaagtctgccgttgccacgttggtggcgaccggaatgttccataccgtcgccagacgcagcaaggctttcacgtcaggatcgtgcggcacggcatttagtggatcccagaagaaaatcaatacatcaattttcccttcactgatcaatgcgccaacctgctggtcaccccccattgggccactcaacatcgcgttgacgttcatgccggtcgcgcgggaaattaagttaccggtagtgcctgttgcatacagtacgtgttgttccagtaacggttgatgccgttccacccagctcatcagcatttgtttgcagtgatcgtgtgccaccagcgcaatatgtttccgcgcaggtaaagtgcgagtcgtcagttccataatgtacatccgtagttaactttcctacagattactgtaagcacttatcgctgcaagataaagaccgaaaaagcctgcgcacaggcacaaaaatctcaggaagatggttgtttttccgcccactgcaggaaagtatttcgcgtttgtgggtcagccagtttaaaccaatacttcagccgttgttctgtgagcacctgagactgcggtggaatagcatccagctcggaaacaccgctaagcagcgtactgtcatctgccatcatcgtggcaaattgcggtagactagcgcgtttcgcggatttgttatagcgttcaacctcgacctcataatcaatcgtttttgccgtactggtaatggcgagaatatccagctttaccggaatcggcgtcgcatcgccatccaacaattcaaggcgcggcgcggcatcaaaatggttagcttcccgctcattctccaggcgaggcaggcgaaaattgacctggttgatgagctgggtattaaaactgaccaccagcggtggggagatatacagccgttcttcactattggaaagatgaatcgtcttctcaacgcgaaacactaactgatgcggtccattatccagttcaatgctgtccgcaccgcgcagcagagagctggaaaccttcttgccgtcgagtaccagaagatcgacatcggtactaagccgcagcgtggtggcaaaaacggataccggcaaacataatgcaatcaaggtggtcacgatgccggttttcataggtagctcctgtcaaaagaccgcccgaataataatgtgtcaaaatttttctttaatcatacttactaacatatagacatatttcccgcttttgctctcattcattcgtattagctgcatggttggcatgtcggctttgtcgtacactttgttaaacagtctggaggaaataatgaaagaaaccgatattgcaggcattttaacgtccactcacaccattgcgctggtgggggcaagcgacaaacccgatcgtcccagctatcgcgtgatgaaatatctactcgaccaggggtatcacgtcattccggttagcccaaaagttgccggcaaaacgctgctgggccagaaggggtatggcacgctggcagacgttccggaaaaagtcgatatggtcgatgttttccgtaatagtgaagcggcgtggggcgtggcacaggaagctattgccattggcgcgaaaactctctggatgcaactgggggtgattaatgagcaagcggcagtactggcacgggatgccgggttaaatgtggtgatggatcgctgcccggctattgagatccctcgcctgggcctggccaaataaaaaatccccggaaggcaaaaaccttccggggatttgttcagggattagttacgcagacgcggggcctggagttgtttgcggatggtctgcgccagctcatccatggatggctgttcaggatgttcatcctgcaattcgctacttagctgggcttcagccaggtaggtatgaaccggtaggccgttatcgtcctccatcactacgtgataccacggagcggcgcgaagctcgtcattcaccgccagctcatcagggctcggttcagagaggctataaaccgggtcgatatccacgaccactccgagataacctaacagggaatggcggacctgctggccgataccgaatttgctggcaatcatagtcacctcccgggaaatctttacctttgatataagggtaaaattccacatttcaagttacatgacgcgacaggcaaaccctttcagatatagcccttccggataggtagcgatcaccggatgatcggctgcctgacggaactgctctataaattgtacatcacgaccggcatcaattgcggcatccgcgatgattttctgaaataaatcgctggtcatcagaccggaacaggagaaagtcaggagaataccgccttcattcagcagctgaatcgccagcatgttgatgtctttataaccacgacacgcgcccatcaactggcttttattctcaacaaacttcggcgggtccatcacgataacgtcaaatttttcaccgcgatcgcgataagtacgcagcaatttaaagacatcatcacggacaaactcagccttgctcagatccagtttgttcagctcaacgttctgccgtgcaatatccagcgcttcctgggaggtatcaacgctgacaacctggctgcaaccgcccatcagtgcgcttacggcgaaaccaccggtataggagaaacagttcagcacacgtttattttcaacgtagcggcgggtagccaggcggctatcacgctggtccaggtagtagcccgttttgtgtccgtgctgaatatccaccagcagtttcattccgtgttcttcaatcggcagcagggcaggtggcaactcgccggtgacggggccctgggtcagctccattccttcttttttacgtaccgcgacgtcgctgcgatcgtaaatgctacattccgggtacagcgtttgcagggcactaattaatgccgcgcgctgatattctgccccagcactcagcagttgcagcaccagaaaattaccgaaacgatcgatagtaatacccggcaggccatcagattctccggcgattaaacgatagctgtcgaggccatctttttgcgccagccagtcacgccatttttgtgcttgttgcaaacggcgggaaaaaaaagcaatgtcgatagactcagacgggtcaaacgtccagacgcgcgcccggatttggctagctgggctataagcgccgcgtgctaaccattttccctgatgatcaacaatatcgatggtttcaccgaggctggctttaccttccatgcgggcaacggccccggaaaagacccacggatggcgacgaagtaatgatttttcgcgccctttggctaacactaaacgtacactcataatttacttttctgtcgatgcaaagaaatgggcgtcattgtccggagttttccatggatttgcaacgcgtccattaaggataaggagagcagcaatgagcaaagtctgcataattgcctgggtttacgggcgagttcagggcgtaggatttcgctacaccacacagtacgaagcgaaaagactgggtttaaccgggtacgccaaaaatcttgacgatggcagcgtggaagtggttgcttgcggtgaagaagggcaggtggaaaaattaatgcagtggttaaagagtggcggcccgcgttctgcgcgtgtagaacgggtgctcagcgagccgcatcatcccagcggggaattaaccgattttcgtatccgttaaatacattttaccggttttggcaggccagcaattttggtggcttgcttagccggacctttcggaaacagtcggtataaatagcggctgttacctttttcttcgccaaatttattcgccatcgcttttaccagcatacgaatcgccggagaagtattgaattccagatagaaatcacgcacaaaacgcaccacttcccagtgttccggactcaggctaatcccttcgttctctgcaatcaccacagccagcggctcactccactggctgctttctttgagatagccttcggtatccgtttctatctctttaccttcgaagatcagcataattattactaccttaatcagactggcggcagtgtaacaaaaaacaaagccccgcataaagcgaggctatgaaagtgttagcgggtgagattaatcgcggctagcgaagcccagaatgctcagcaggctgacgaagatgttgtacaggctaacatacaggctaaccgtggcacgaatatagttcgtctcaccgccatgaatgatgttgctggtttcaaacaagatagcgccagaggagatcagaatgaagaccgcgctgatcgccagatgcagagcaggcagctgcaggaagatattcgcaaccataccaatcagcaccaccacaatacccgccatcagcataccgccgaggaagctcatatctttgcgggtggtcagcacatatgcagagcagcagaagaacactaacgccgttccgcccagtgccatagcgattacgtcacccattccggcagacagataggtgttcagaataggtccgaggatataacccagaaaaccggtaaaggcgaatgcggagataatcccggtcggcttattcgccgttttataggtcaggaacatcaaaccatacatacccaccagcgtcagaatcagacccggagatggcagcatcagcaccgtactggcagttgcggtaatcgcgctaaaggccagcgtcaggctcagcagaaaataggtattacgcagcaccttatgggtgctaagcagacttgtacggtcatgactagaactaacaatacgatccattgagtcactctctatgacagatgtaattaattaagcagcataatgataatgcgtaagggcacccagaagttttacccatctttacgcatttgatctggaacaggtttaacagcggattatcaggtcattaagcaaatataacgccctgagaatttcgacaggcaaaagaaaaaggggttagcatttagctaaccccttatcttatttggcggaagcgcagagattcgaactctggaaccctttcgggtcgccggttttcaagaccggtgccttcaaccgctcggccacacttccggaatgacgcgcactataaacatcccgatgcggcgtgtaaacccctaatttgtttgtttgcctgaaaaacagccaaaagtgcattgatagcgtgaaataacagcagattgatcatttcatcaccatgaattccttctcttttactcgtttagcaaccggctaaacatccccaccgcccggccaaaagaaaaataggtccatttttatcgctaaaagataaatccacacagtttgtattgttttgtgcaaaagtttcactacgctttattaacaatactttctggcgacgtgcgccagtgcagaaggatgagctttcgttttcagcatctcacgtgaagcgatggtttgccttgctacagggacgtcgcttgccgaccataagcgcccggtgtcctgccggtgtcgcaaggaggagagacgtgcgatatgaataacgaggaaacattttaccaggccatgcggcgtcagggcgttacccggcgcagctttctcaaatattgtagtctggctgccacgagcctgggattaggcgcgggaatggcaccaaagattgcctgggcgctggagaacaaaccgcgcattccggtggtatggatccacggtctggaatgcacctgctgtaccgaatcttttatccgctccgctcacccactggcgaaggacgtcatcctttccctgatttccctcgattacgacgatactttgatggctgccgccggaacccaggcggaagaagtctttgaagacatcatcacgcaatacaatggcaaatatatcctcgcagtagaaggtaatccgccgctgggcgagcaggggatgttctgtatcagcagcggtcgaccgtttattgagaaactcaaacgtgccgctgccggagccagcgcgattatcgcctggggaacctgcgcgtcctggggctgcgtgcaggccgcgcgacccaatccgacgcaggcaacgcctatcgacaaagtcatcaccgacaaacccattatcaaagtacctggctgcccgccgatcccggatgtgatgagcgccatcattacttacatggtgacctttgatcgcttgccagatgtcgacagaatgggccgtccgctgatgttctatggtcagcgaatccacgataaatgctatcgccgcgcccacttcgacgccggagagttcgtccagagttgggatgatgacgctgcccgcaaaggttactgcctgtacaaaatgggctgcaaagggcctaccacctataacgcctgttcctccacacgctggaatgatggcgtttctttcccaatccagtctggtcacggctgcctgggctgtgcggaaaatggtttctgggatcgcggtagcttctacagccgcgtggtcgatattccgcaaatgggtactcattccaccgccgataccgtcggtttaaccgcgcttggcgtggtggcagcggctgttggtgtgcacgcagtcgccagcgccgttgaccagcgcagacgtcataaccagcaacctacagaaaccgaacatcagccaggcaatgaggataaacaggcatgagcactcagtacgaaactcagggatacaccatcaataatgccggacgccgcctggtggtcgacccgattacgcgcatcgaaggccacatgcgctgcgaagtgaatattaacgatcagaatgtgatcaccaatgccgtctcctgcggcaccatgtttcgcgggctggagatcatcctacaagggcgcgacccgcgcgatgcgtgggcgttcgttgaacgtatctgcggcgtctgtactggcgtacacgccctggctagcgtttacgccatcgaagatgctatcggtattaaagtgccggacaacgccaatatcatccgcaacattatgctggcaacgctctggtgccacgatcatctggtgcacttctatcagcttgccgggatggactggatcgatgtgttagatgcgctgaaagccgacccgcggaaaacctccgaactggcgcaaagtctctcctcttggccgaaaagttcccctggctatttcttcgacgtacaaaaccgcctgaaaaaatttgttgaaggcgggcagttggggatcttccgcaatggctactgggggcacccgcagtacaaactgccgccagaagctaacctgatgggctttgcccactatctcgaagctctcgatttccagcgtgaaattgtcaaaatccacgcggtctttggcggtaaaaacccgcatccaaactggattgtcggcgggatgccttgcgccatcaacattgacgaaagcggcgcggtcggggcagtcaatatggaacgcctgaacctggtgcagagtattatcacccgcacggcggacttcattaacaacgtgatgatccccgacgccttagccatcggtcagttcaacaaaccgtggagcgaaatcggcactggtctttctgataaatgcgttctcagctacggcgcattcccggatattgccaacgactttggcgagaaaagtctgctgatgcctggcggcgcggtgattaacggcgacttcaacaatgtgctgccagtggatttggttgatccgcagcaggtgcaggagtttgtcgaccacgcctggtatcgatatcccaacgatcaggtcgggcgtcatccgttcgatggcatcaccgacccgtggtacaaccccggcgatgtcaaaggcagcgataccaacattcagcagctgaatgaacaggaacgctacagctggatcaaagcgccacgctggcgcggtaacgcgatggaagtggggccgctggcgcgcacgttaatcgcttatcacaaaggcgatgctgcgaccgttgagagcgtcgatcgcatgatgagcgcgttgaacctgccgctttccggtatccagagtacgttaggccgcattttgtgccgcgcgcacgaagcgcagtgggccgcaggtaagttgcagtatttcttcgacaagctgatgaccaacctgaaaaacggcaatctcgccactgcttccacggaaaaatgggaacctgcaacctggccgacagagtgccgtggtgtcggttttaccgaagcgccgcgcggggcgttaggccactgggccgccattcgcgatggcaagattgatctctaccagtgcgtggtgccgaccacctggaacgccagcccgcgcgatcccaaagggcagattggcgcttatgaagcggcgctgatgaacaccaaaatggcgatccccgagcaaccgctggagatcctgcgtactctgcacagctttgacccgtgcctcgcctgtagtacacacgtgctgggcgacgacggtagcgagctgatctccgtgcaggtgcgttaacagcgaaggagaatcatcatgcaacagaaaagcgacaacgttgtcagccactatgtctttgaagcgccagtgcgcatctggcactggttgacggtgttatgcatggcggtgttgatggtcaccggatactttatcggcaagccgctaccttccgtcagcggcgaggcgacgtatctgttctatatgggctacatcaggttaattcacttcagcgccgggatggtttttaccgtggttttgctgatgcggatctactgggcttttgttggcaatcgatactcccgcgagctgtttatcgtgccggtatggcgtaaaagctggtggcagggcgtgtggtatgaaatccgctggtatctgtttctggcaaaacgtccgagtgccgatataggccataatcccatcgcccaggcggcgatgttcggctatttcctgatgagcgtctttatgatcatcactggttttgcgctgtacagcgaacacagccagtacgctatttttgcgccgttccgttatgtggtggaatttttctactggacgggtggcaacagtatggacattcacagctggcatcggctggggatgtggctgattggcgcgtttgtgatcggtcatgtctacatggcgctgcgtgaagacatcatgtccgacgacacggtgatctccaccatggtcaacggctaccgtagccacaaatttggcaaaataagtaacaaggagcgtagttgagctaaataagtaacaaggagcgttcatgagcgagcaacgcgtggtggtcatggggctgggcaacctgctgtgggccgatgaaggcttcggcgtgcgggtggcggaacggctgtatgcccattaccactggcccgagtatgtggagattgtcgatggcggtactcagggactgaacttgctggggtatgtcgaaagcgccagccatctgttgattctcgatgccattgactacgggctggaacctggaacgctgcgaacctatgccggagaacgcattccggcttatctcagcgcgaagaaaatgagcctgcatcagaacagtttctccgaagtgttggcgctggcggatatccgcggacatctgccagcacatattgccctcgtcggtctgcaacccgcaatgctcgacgactacggcggtagcctgagcgaactggcacgggagcaactgcccgctgcggaacaggcggcgctggcgcagcttgctgcgtggggaattgtgccgcaaccggctaatgaaagccgctgtctcaattatgactgtctgagcatggaaaattacgaaggcgttcgcttgcgccagtaccggatgacacaggaggagcagggatgagcaacgacacgccatttgatgcgttgtggcaacgaatgctggcgcgcggctggacgccagtcagtgaatcccgtcttgacgactggcttacgcaagcgccagacggcgtggtgttattaagcagtgacccgaaacgcacgccagaggtcagcgataatccggtaatgattggcgaattactgcgcgagtttcccgactatacatggcaggtggcgattgctgaccttgagcagagcgaagccatcggcgatcgctttggcgtctttcgctttcctgccactttagtgtttaccggcggaaactatcgcggcgtgctgaatggtattcacccgtgggcggaactgataaacctgatgcgcgggcttgtcgaaccgcagcaggagcgtgccagttgatctaaccgcagcaggagcgtgcctcatgagcgaaacttttttccatctgctggggccaggaacgcaaccgaacgatgacagtttcagcatgaatccactgccgatcacctgtcaggtgaatgatgaaccgagtatggcggccctggagcaatgtgctcacagcccgcaggtgattgcgctgttaaacgagttacaacatcaactaagcgaacgccaaccgccgttgggcgaggtgctggcagtcgatctgttaaatctcaacgccgacgatcgtcactttatcaatacgcttctcggggaaggggaagtgagtgtgcgcattcagcaggctgacgacagtgaaagtgaaatacaggaggcgatcttctgcggattatggcgggtgcgcagacgtcgcggcgaaaagttgctggaggacaaactggaggctggctgcgcgccgctggcgttgtggcaggcggcaacgcaaaatctcttgccgacagatagcctgttaccgccgcccattgatggcctgatgaatggcctaccgttggcgcatgagttactggcacatgtacgtaaccccgacgcgcagccgcacagcattaatctgacgcaattacccatcagcgaggctgatcggctttttctcagtcgtctctgtgggccgggaaatattcagattcgtaccattggctatggcgagagctatatcaacgccacggggttacgccatgtctggcatttacgctgtacggacaccttaaaaggcccgttactggaaagttatgaaatctgcccaataccggaagtggtgctggcagcgccagaagatttggtcgactctgcgcagcggcttagcgaggtatgtcagtggctggcggaagctgcaccgacgtaaaaagacggtaagtatcgctttcagtcttatgaatatcgcaatcggcgaatacctctggtcgtagagtttcaggataaagagggagatctaccattatcgggttatttttctctcttcgcctacaggagtgcgcatgtgggatgtcattgatttaagccgctggcagtttgctctgaccgcgctgtatcactttttatttgtaccccttaccctggggctgatttttttgctggctattatggaaaccatttacgtggtcaccggcaaaacaatctaccgcgatatgacgcgcttctggggtaagctcttcggtatcaattttgctcttggcgtggctaccggcctgaccatggagtttcagtttggtactaactggagtttctattccaactatgtgggcgatatttttggcgcaccgctggcgatggaagcattaatggccttcttcctcgaatccacctttgtcgggctgttcttcttcggctggcaacggctgaataaataccagcacctgctggtgacgtggctggtggcgttcggtagtaatctctctgcgttgtggatattgaatgccaacggttggatgcaatacccgaccggtgcgcattttgatatcgacaccctgcgtatggagatgaccagcttcagcgagctggtctttaatccggtcagccaggtgaaatttgtgcacaccgtaatggcgggctacgtgaccggggccatgtttattatggcgatcagcgcctggtatttactgcgcggacgggagcgcaatgtcgcattacgcagctttgccatcggttccgtcttcggtactctggcgattatcggtaccctgcaactcggagacagttctgcgtatgaagtcgcgcaagtacaaccggtaaaactggcggcgatggaaggggagtggcaaacggaacctgcacctgcaccgttccatgtggttgcctggccggaacaggatcaagagcgtaacgcctttgccctcaaaattcccgcgctgctagggatcctcgccactcacagtttagataaacccgtgccgggtctgaagaatttgatggctgaaacctacccacgcttgcaacgcggacgtatggcctggctgttaatgcaggaaataagccaaggcaatcgtgagccgcatgtgttgcaggcattccggggactggaaggtgacctgggctacggcatgttgctctcccgctatgcgccggatatgaatcatgtcacagccgcacagtaccaggcggcgatgcgtggcgcgatacctcaggttgcgccggtattctggagtttccgcatcatggtgggctgtggttccctgctgctactggtgatgctgattgcgcttgtccagacgctgcgtggcaaaatcgaccagcatcgctgggtgctgaaaatggcgctctggagtttgccgttgccgtggattgcgattgaagccgggtggtttatgaccgagtttggtcgtcagccgtgggcgatacaggacatcttaccgacatactccgcgcactccgctttaaccacaggacaactggctttcagtctgatcatgatcgtagggctttacaccctgttcttaatcgccgaagtctacctgatgcagaaatatgcccgtctggggccgagcgcgatgcagagtgaacaaccgacgcagcaacaggggtaaaggagaaaatcatgtttgattatgaaacattgcgcttcatctggtggctgctgattggcgtgatcctggtggtctttatgatctccgacggatttgacatggggatcggctgtctgctgccgctggtggcgcgtaatgatgatgaacgccggatagtgataaacagcgttggtgcacactgggaaggcaaccaggtctggttgatcctcgctggtggggcattatttgccgcctggcccagagtgtatgcagcggcgttttccggcttttatgtggcgatgatcctggtgctgtgcagtctgttcttccgcccgctggcctttgattatcgcggaaaaatcgccgatgcacgctggcgtaaaatgtgggacgccggtctggtcatcggcagtctggtgccgccggtagtcttcggtatcgccttcggcaacttgttgctcggcgtgccgtttgccttcacaccgcaattacgcgtggagtatctcggcagcttctggcaactgctgacgccattccctttattgtgcggattgctcagccttgggatggtgattttgcaaggtggcgtctggttacaactgaaaactgttggtgtgattcatctgcgtagtcagctggcgaccaaacgcgctgcactgttggtgatgctgtgctttttgctggcgggttactggctgtgggtcggtattgatggctttgtactgctcgcccaggatgctaacggtccttccaatccgttaatgaaactggtggcagtgctacctggtgcctggatgaataattttgtcgagagccccgttttgtggatcttcccgctgctgggattcttctgcccattgctgacggtgatggcgatttatcgtggtcgcccgggttggggatttttgatggcaagtttgatgcaatttggcgtgattttcacggcaggcatcacgctgttcccctttgtcatgccgagtagcgtgagtccgatctccagcctgacgttgtgggacagtacttccagtcagctgacgctgagcattatgttggtaatcgtgctgatatttttgcccattgtgttgctctacactctctggagctactacaaaatgtgggggcgcatgacaacagaaactctccgccgtaacgaaaacgagttgtactaaggagcagaaacaatgtggtatttactttggttcgtcggcattttgttgatgtgttcgctctccacccttgtgttggtatggctggacccgcgtctgaaaagttaacgaacgtaggcctgatgcggcgcattagcatcgcatcaggcaatcaataatgtcagatatgaaaagcggaaacatatcgatgaaagcgatcttaatcccatttttatctcttctgattccgttaaccccgcaatctgcattcgctcagagtgagccggagctgaagctggaaagtgtggtgattgtcagtcgtcatggtgtgcgtgctccaaccaaggccacgcaactgatgcaggatgtcaccccagacgcatggccaacctggccggtaaaactgggttggctgacaccgcgcggtggtgagctaatcgcctatctcggacattaccaacgccagcgtctggtagccgacggattgctggcgaaaaagggctgcccgcagtctggtcaggtcgcgattattgctgatgtcgacgagcgtacccgtaaaacaggcgaagccttcgccgccgggctggcacctgactgtgcaataaccgtacatacccaggcagatacgtccagtcccgatccgttatttaatcctctaaaaactggcgtttgccaactggataacgcgaacgtgactgacgcgatcctcagcagggcaggagggagtattgctgactttaccgggcatcggcaaacggcgtttcgcgaactggaacgggtgcttaattttccgcaaagtaacttgtgccttaaacgtgagaaacaggacgaaagctgtagtttaacgcaggcattaccaagcgaactcaaggtgagcgccgacaatgtcagtttaaccggtgcggtaagcctcgcaagtatgctgacggagatatttctcctgcaacaagcacagggaatgccggagccggggtggggaaggatcaccgatagtcaccagtggaacaccttgctaagtttgcataacgcgcaattttatttgctacaacgcacgccagaggttgcccgcagccgcgccaccccgttattagatttgatcaagacagcgttgacgccccatccaccgcaaaaacaggcgtatggtgtgacattacccactagtgtgctgtttatcgccggacacgatactaatctggcaaatctcggcggcgcactggagctcaactggacgcttcccggtcagccggataacacgccgccaggtggtgaactggtgtttgaacgctggcgtcggctaagcgataacagccagtggattcaggttagcctggtcttccagactttacagcagatgcgtgataaaacgccgctgagtttaaatacgccgcccggagaggtgaaactgaccctggcaggatgtgaagagcgaaatgcgcagggcatgtgtagcttggcaggttttacgcaaatcgtgaatgaagcacgcataccggcgtgcagtttgtaatgcataaaaaagagcattcagttacctgaatgctctgaggctgatgacaaacgaagaactgtctaatgcgtagaccggaaaaggcgttcacgccgcatccggccactttcagtttgcaatacgtacgcttgagatcaggattgtctactttgagtataacatccttgtgaaatctccctttcctcataccgcttgcactatatactgcgggtaggaaaggcgcgcagagggaaatataagattgttaactatccccctctggaaatacgacttgtgagcataagataaatcttagcaaaatacaaattaaagataaggaaattgttacgaaagctattaattattgttggtaatatagtttcaagtggtactataactggctgttaaatggcatttataactattaggtgcagagatattcgcttaaatggattagtttctttgtggaaaagtaactgatgttataatgtatgatgttgactatttcactattccaataaaaccagtcagctttaaacaagcagcgtcatattaagagagataaacatttgccgctgttggtcctcgcaggccatttacgcggcaaaattccacacgtaatcctggtataagcacttctgcgtcgcggggagtgaatgcggaaatatggacctgaacttctttacgaccgtcggaggggataatgaatcctttgccgcttttgcgatcaaaggttttgacaattcctgtcattttacgggacaaacaaattccttactgaaaatactgcgctgcactatacggggttaataaaataaagccagcgatatttaagaccgccggacggctaaaataaaatttgcttaatctcaattatcatgcgttaatagctgcgtcggtttgaaagacagacagcatacaaagtagtttactaaagcagttctcattatcaggcattatccccttcttttgagtctctctcctgaacactaagtagtttctgtattaaagccctgtttgccgaaaggcccaaaatgaaggaagtaaaatatgtctaataaaatgactggtttagtaaaatggtttaacgcagataaaggttttggctttatcactcctgatgatggcagcaaagacgttttcgtccatttcaccgccatccagagcaatgaattccgcacgctgaacgaaaatcagaaagttgaattttctattgagcaggggcaacgtggccccgcggcagcgaacgttgttacgctctaaggttgccattattactcaacatctccatttccgctgtccatgttgtcatggttcacagtaccgcacatcggcattcgatgtgacggagcgaaaccctttgggcgctaagtgtattttttgtaaatcgacgatgatcacctttgataacgtcgcgctgcaaatacgcactgaccatgcgccgctggattagtcaaaataatatcaggctccctcgtggagccttttttatatctgccttatttttcttcaacgctgtatgtatagtaagcgataacctgttgattattgaatctttcggggagatggcttataacatttcttacctgaccagggtaccgggaaccaacaccttactggcgtgttgctgtcttttaagaccagaagaggttaacagtgaatattgaagagttaaaaaaacaagccgaaacggaaatcgccgactttatcgcgcaaaaaatcgccgagctgaacaagaatacagggaaagaagtctctgaaattcgcttcaccgcacgagaaaaaatgaccgggcttgaaagttatgatgtcaaaatcaaaataatgtgattttgtgaacatcaccccgtgcgaggtgatgttccgcttgttgctaatttagtgaccaatcattggcgcttgtggaattaagcgtcggtacaattcctccggcaccgggctttgccatactcccgcatacattgcgtaaccaatcaccgcaaacataatccccagaaccagtagcgtcattaaccagccagacaacgcaaaggcttttttatttgccgcaggtttttgcagactaaaggtcaatgtactggctaccggacaactctctacgcaagtcatacagccggtacattccactgttcgtacctgaattaatttatcgaccgggatccgacttgggcaattttttgcgcatttgccacagtcgatacaactttcggcattgcgacgaatcttaaacgggctcaataggctaaccacgcccatcagcgcgccatatgggcaaagataacgacaccaggcatggcgaataaacaggctggcaatcagcaaaacggtcacgctgattaatgtcgcggtccccatatgacgaaagaaatcgagcattttaacgtccatcaccacgctgtaggggctcaacataaaatagtgaatcgcctgagcgggcatcaataacgcgatatagataaaaaaactcaacagcaaatacttcacgccgcgcagaggaatatccagccagcggggaaggacacattgccgaccaaacagtttgttaccgagatcgccgattaattcagaaagcgtaccaaccgggcataaccaactgcaaaaggcctttttgagtaatagactgatgacgataaaagcgaccaataacagcatcgcggcggcgtggacggacggtaactgacctgttacaaggctatatttcagattcatcagcccggcaatcggtagccagccttcgatacctcccggtctggcgacaaatgtcgtgctacttgccgtttcgtaatagcgcacccaataccagaacgtgatggcaatataaatattcattgccaacagtaataattgcgtcgctttacgccaggtcgtggcattacgccagtcattccacggtaatttgccgcccgtcgtgcctggccgccgctgccagcgggttcttttattctctgccatgattttgccagtccgttaagttgtataccaaatgccactattctagttgttcttaactggctgatattgattcaaatcgcgttcaggtctttcttatgcaaccatgcttccagagcggcaacactgcgtgtaatttcttcgtgtggaaggggggcagataatggctgctgctccagttgtgcgcatagctggctggcgatatgcattcccagactgctgcaactgctttttagctgatgcgcggcacgctttattttctcgctatcctgactggcgcgggcaatgtcgatttcatcgagaagcggcagggcatgttgtgtaaataataccagccattcgtggatcttctccgtccccattaactgagcatcttcattgagttggcttacatccaggctttgatcattattgacttgcagttggagatagtgcgccagtaactgaccgagcacttcacgcggcaccggtttagggataatcccgcggaataaactactggtacgctggcgcagcgtttcgtcaatgacatgggcgctaaagccaatcaaaaccaggctcggatattgctgtgccagttgtcgggcaagcgtaatgccgtcgatatccggcagatcaaaatccaccagtgcggcagcaaacggttcgctattttgcagtgtctctaaagcctgcgcggcattgccaacagcaacaatctgcgcaccactggttttcagcatctcaatggtaattcgctgggttagcgggttatcttcaattaacagcaaacgtaaaccgtcaagacgcaccgcctgattgactgtttttggcacgggtgccgtggcaacacgtaacggcaagcgtaaacaaaaacagcttccaacctccggcgtgctggtggcgctcagttcgccgcccatcgcctgggccagacggctactgatagtcagtcccagcccggtgccgccgcgtttgccgcttacctgcacaaatggctggaagatttctgccagtttcgcgggatcaataccgcagccgctgtcttccacttcgaccagccattgctcgccatcagtgcgactacgcaggataatgtacccttcgtcagtaaaacgcagggcgttgctcaacaggttggttataacctgacgaatacgtcgtggatcgcccattaacgcgcacggcatatcatcggcaattgccgttgccaggcgaatcgggcgacctttcacccgtccgctcattaattgcagggtactttccagcagcgggcgcggttcaaagggctcatcgctgacgctaacattcttgccacctgcttcgatagcggaataatcgagaatatcgttgaggatggtcagcaagctttcaccagagtcagtaattgcccgcaaatcatcacgctgggcgttaagtgcggggttatctgccagcagttgagcagtgccgagaataccgtacagcggtgtgcggatctcatggctcatcgccgccagaaacgcgctttttgcctggctggctttttctgcttccgcccgtgcctgtcggtgttctatcaccagttcctgcaattcagctgtacgcgctttgacctgcgccgccagctgttcgcggtggcgattcagtgcatgaacattgctgcgaaacgcatccatcagccgcccgatggtatccagctcccgtacgccagcggtttccgggaaaggggagtcaatatcaccgtccagcagccgttgcagcgcctgcgtttgttcggcaagtggacgcgtgacactgcgataaaccacgcgccagaggatcagaatcagtgcgcaaagactaaccatccccagcaataacaggctgtattgcccgcgtgcactcgctttttccagatgcgccagtccgtgctgattacgcagctcaatggtgtcgaccagctgactgacttcgctactaaactgcgcgaactgggcgatgttattttgtgcgagagtttgtaggtgattgctgatttcactgtcctgctgatacagcgccagcaaatcgctatattggctaacggtagttaacgttgttgcgacctgcgcacgaacacccggatcttcaatgcgtatttgccgacgttgcagaattttcaccgcattattgagctgcttttccagcgttggtgcatttttctggatctgctccagccccagattcatcaccatttgctgcacccgcagagcgctaaggcgcagttcattcatctggttaacatactcaagatcgatatcaatcagccgatcgagtgcactttcagcagcctgacgctgatcttgttcgatcaaatcgtaaatcccggcctgggtcgctccagcggaagttgtcgcattattcgcctgaccttgcgccaggcgtgcgatctcatcggcggcagcgactatctgctgactgagttgctgttgttgctggcgcagttgcaaacgctgccccaccagttccccttgctgacgtaagctacgggagatctcctgctcctgttgttcaatagcggtggtatcaaaaccttgttcccgtaacgcttgcagcaacgcattaatcttcaggctttgtgcggtgagcattcgcccctgcgcctgccacatcttttcgttatcggcactggtcaggttctgcgcggcgaaaagttcccaggcgctggcttcgctcaactggcgcgccatattcatggtaggaatcaatgcctgagtgttgtctttttccacctggctgataaagcgcaggttgtaccatcccaccagggtactggtcagggttaacagcgccatcagggcaaagcccatccagagtcttcgggtcagggttaaattcacggtcggtgcactttaggtgaaaaaggttgagtcgcaaagcggaatgcatctagcataaagccttattattgatgaggctatcatgcgcgtactgctatttttacttctttcccttttcatgttgccggcatttagcgctgataacctgttgcgctggcatgatgcgcagcatttcacggtgcaagcctctacgccgcttaaagccaaacgcgcatggaaactgtgcgcgctttatcccagcctgaaagatagttattggttaagcttgaactatggtatgcaggaggctgctcgccgctacggtgtggatttaaaagtgctggaggcaggcggctacagccagttggctacccagcaagcacaaatcgaccagtgtaaacagtggggcgcagaggccattttgctcggtagtagcacgaccagttttcccgacctgcaaaagcaggtagcaagtctgccggtgatcgaactggtaaatgctattgatgctccccaggtgaaaagccgcgttggtgtgccctggtttcagatgggctatcaaccggggcgatatctggtgcaatgggcgcacggtaaaccactgaatgtgctgttgatgcccggacccgataacgccgggggcagtaaggagatggtcgagggttttcgcgcagccattgccggaagcccggtgcgtattgttgatattgcgcttggtgataacgatattgaaatccagcgtaacctgttgcaggagatgctggaacgccatccagaaatcgacgtcgttgccggaacggccattgcggcagaggcggcaatgggggaagggcgtaacctgaaaacgccgcttaccgtggtgagcttttatcttagtcatcaggtgtatcgcgggctgaagcggggaagagtgattatggctgccagcgatcaaatggtctggcagggggaactggcggttgagcaggccatcaggcaattacaggggcaaagcgtttctgataatgtcagcccaccgattttagttctgacgccgaaaaatgccgaccgtgaacatattcgccgcagcctgagtccagggggatttcgtccggtctatttttatcagcacacaagtgcggctaagaaataatcagcacacatcagcggctaagaaataaccttcaccatgttgcgtcaccagtaaatccgcgctgagtttatgacgtaaacgacgaattaacacatcgacggtgcgcaggtcagggttttccacccgacgcgcagaaagcatacgtagcagacgttcacggctgagaatttcgcccggattcgtcacaaatgccaccaacatttcatactctgcgcgggtcagtttaatcggctcgccatcccgctccagcgtatggcggctcacattcaggcaataaccggcaaagcgatagcagttgtcctgagtgtgcggttgagcttgtcgcgcgaggtcgattcgccagagcagatttttcacccgtactaccagttcgcgcagttccagcggtttggtgacgtaatcgtctgcgcccatttccagcccaacaatacggtcaatccgatcgctgcgtccggtaaccagaataatccccaccgtactgcgttctcgcagggcgcgggttaacatcaggccattttcatcgggtaagttgatatccagcagaattaaatctacgctctgattctgcataatttcccgtagcccagcaccgctcgccgtaacggaaacggtatacccctcctgagtgaagtaggattgtaatcgcgcctgggtaaccggctcatcttcaacaataacaatgtgatgtggcatcagagggttttactcattctgttcatatctgttcatattctgccgtaagccgttcatcctgaccagtgccgctgttcatatttgctcattaagatcgcttcactaaaccataattctacaggggttattatgcggaaactctggaacgcgctacgccgacccagtgctcgttggagcgtactggcgctggtcgcaattgggattgtgattggcattgcgctgattgtattgccacacgttgggatcaaagtcaccagcacaaccgaattttgtgtcagttgccacagtatgcaaccggtgtatgaagaatataaacagagcgtgcatttccagaacgcctccggcgtgcgagctgaatgccatgactgtcatatcccgccggatattccaggcatggtgaagcgcaaactggaagcgagcaatgatatctaccagacctttattgctcactccattgatacacctgaaaaattcgaagccaaacgcgcggaacttgccgagcgtgaatgggcgcgaatgaaagaaaacaacagcgcaacctgccgctcctgccataactacgatgcgatggatcatgcgaagcagcatcctgaagcagcacgtcagatgaaggtggcagcgaaagataatcaatcctgcatcgactgtcataaaggtattgcccaccagttaccggatatgagtagcggcttccgtaagcagttcgatgagctgcgcgccagtgctaatgacagtggtgacacgctgtactctattgatattaagccaatttatgcggcgaaaggcgataaagaagcctctggttctctgctgcctgctagcgaagtgaaagtccttaaacgtgacggcgactggctgcaaattgaaattaccggctggacggaaagcgccggacgtcagcgtgtactcacccaattcccaggtaaacgcatctttgttgccagcattcgtggtgatgtgcagcagcaggtaaaaacgctggagaaaaccaccgttgccgacaccaataccgagtggagcaagttgcaggccactgcgtggatgaagaaaggcgacatggtgaacgatatcaaaccgatctgggcttatgcggatagcttgtacaacggcacctgtaaccagtgccacggcgcaccggaaatcgcccactttgacgctaacggttggatcggcacgctcaacggcatgattggctttaccagtctcgataaacgtgaagaacgcaccttgttgaaatatctgcaaatgaatgcgtctgacaccgcaggtaaggctcacggcgataagaaggaagaaaaataatgaacaataacgatctctttcaggcaagtcgtcggcgttttctggcacaactcggcggcttaaccgtcgccgggatgctggggccgagtttgttaacgccgcgacgtgcgactgcggcgcaagcggcgactgacgctgtcatcagcaaagagggcattcttaccgggagccactggggggctatccgcgcgacggtgaaggatggtcgctttgtggcggcaaaaccgttcgaactggataaatatccgagcaaaatgattgccggattgccggatcacgtacacaacgcggcgcgtattcgttatccgatggtacgcgtggactggctgcgtaagcgccatctcagcgatacctcccagcgcggtgataaccgttttgtgcgcgtgagctgggatgaagccctcgacatgttctatgaagaactggaacgcgtgcagaaaactcacgggccgagtgccttgctgaccgccagtggttggcaaagcacggggatgttccataacgctagcgggatgctggcgaaagctattgccttgcatggtaatagcgttggtacgggcggagattactctaccggtgctgcgcaggtgatcctgccgcgcgtagtcggtagcatggaagtgtatgaacagcaaacctcctggccgctggtattgcagaacagcaaaaccattgtgctgtggggctccgatttgctgaaaaaccagcaagcgaactggtggtgcccggatcacgatgtttatgaatattacgcgcagctaaaagcgaaagtcgccgccggtgaaattgaggtcatcagcatcgatccggttgtcacatccacccatgagtatctggggcgcgagcatgtgaagcacattgcggttaacccgcaaactgacgtgccgctgcaactggcgctggcacatacgctgtacagtgaaaacctgtacgacaaaaacttccttgctaactactgtgtgggttttgagcagttcctgccgtatctgctgggtgagaaagacggtcagccgaaagatgccgcatgggctgaaaaactgaccggcattgatgccgaaaccattcgtgggctggcgcggcagatggcggcgaacagaacgcaaattattgctggctggtgcgtgcagcgtatgcagcacggtgaacagtgggcgtggatgattgtggttctggcggcgatgctggggcaaattggcctgccaggtggtggttttggttttggctggcactacaacggcgcaggcacgccggggcgtaaaggcgttattctgagtggtttctccggctctacgagcattccgcctgttcacgacaacagtgactacaaaggctacagcagcactattccgattgcccgttttatcgatgcgatcctcgaaccggggaaagtgatcaactggaacggtaaaagcgtaaaactgccgccgctgaaaatgtgtatttttgccggaactaacccattccatcgccatcagcagatcaaccgcattattgaaggcttgcgcaagctggaaacggttatcgccatagataaccagtggaccagtacctgccgctttgccgatatcgtactgcctgcgaccacgcagtttgagcgtaacgatctcgaccagtacggcaatcactccaaccgtggcattatcgccatgaaacaggtggtgccgccgcagttcgaggcgcgcaacgacttcgatattttccgcgagctgtgccgtcgctttaatcgcgaagaagcctttaccgaagggctggacgaaatgggctggctgaaacgcatctggcaggaaggtgtacagcaaggcaaaggacgcggcgttcatctgccagcgtttgatgacttctggaataacaaagagtacgtcgagtttgaccatccgcagatgtttgttcgccaccaggcattccgcgaagatccggatctcgaaccgctgggcacgccgagtggcctgattgagatctacagcaaaactatcgccgatatgaactacgacgattgtcaggggcatccgatgtggtttgagaaaatcgaacgctcccacggtgggcctggcagccaaaagtatccgttgcatctgcaatctgtgcatccggatttccgacttcacagccagttatgtgagagcgaaacgctgcgtcagcaatatacggtagcgggtaaagagccagtattcattaacccgcaggatgccagcgcgcgcggtattcgtaacggtgatgtggtacgcgtctttaacgctcgcggtcaggtgttggcaggggcagtggtttctgaccgctatgcacccggcgtggcacgaattcacgaaggggcatggtacgatccagataaaggcggcgagcctggtgcgctgtgcaaatacggtaaccccaacgtgttgaccatcgacatcggtacaagccagctggcgcaggcgaccagtgcgcacactacgctggtggaaattgagaagtacaacggaacagtggagcaggtgacggcgtttaacggccccgtggagatggtggcgcagtgcgaatatgttcccgcgagccaggtgaaaagttgaattaacccgcgtcgcaggtgaaatcatgaccacgctgacagcacaacagattgcctgtgtttacgcctggctagcgcagttgttctcccgtgagctggacgatgaacaactgacgcaaatcgccagtgcgcagatggctgaatggtttagcttgctgaaaagcgaaccgccgctcactgcggcggtgaacgagctggaaaaccgtattgccacgctgacagtacgtgacgatgcccgtctggaactggccgcggacttttgcggcctgtttctgatgaccgacaaacaagcggcgctgccgtatgcaagcgcctacaaacaggacgagcaagagattaaacgcttgttagttgaggcagggatggaaaccagcggcaatttcaacgaaccggcagatcatctggcgatctatctcgaattgctcagccatctgcattttagcctgggagaggggaccgttcctgcgcgaagaatcgacagtttgcggcaaaaaacactgacggcgctgtggcaatggttaccagagtttgttgcgcgttgtcgtcagtatgacagctttggtttttacgcggcactaagccagttattgctggtgttagtggagtgcgaccaccaaaacagataacgtcgtttgtgcgcctgaaaagacgcgtttagcgtcgcatcaggcattatggcgcagttgccggatgcggcgtgaacgtcttatccggcccacaggaactgtaatctttgtagaccggttaagatgcgtcatcgcatccggcaaacacacatcacggatgagctacaaaccgggaaagccgctggcgcagcaggcggttttcctgcttcaggtgcgcaatatcatccattaacgtcagcgccaccgcgatccccggccagtccagagccagttcatgacgcaggcgtaccgcgcgttgcaccacaatggcggcatggtcgtcaaatacccaggttgtttcctggatctcacgcggttcaaccacccccaaaccgacaatttcattcaactcctcttcagagatgccggtatgcaggcaaaattcggtaatagtaaaagtcaccgtaacattagccattatgctttcccccaatctttacgtggatcaaaagagctctgggcgtctgccagttgctgccacagcgcggcagtgttttcatccggtttcggcggcatcacgattttcagtaccgcatacagatcgccggtctgttttttgctcaccagacctttgcctttaacgcgcaatcgttgcccggcctggctgcctggcgggatagtcagcaaaatgctttctttcagtgttggaacggtgactttagcacccagcgccgcttcccacgggctaaccggcaccacaatttccagatcctggccgacaatatcaaacagcggatgtggcgcaatatgaatcaccagccacaaatcgccatttggaccgccgttttcgcccggcgtcccctggcctttcagacggatgcgttgaccattgccgacgcccgccgggatcttcacattcagcgttttcggaatttcctgttcgatcatgccaaaggcgttataaaccggcaggttatagctgatggtacgcttatgctcagtaagcgtttcttcgaggaataccgccacttcgatttcaatatcgtggccgcgtgtggcggggcgttgacggctctggcgggcatgctgaccgaaaatactgctgaagatatcgtcaaaatcttcggcgttaaaactctgaccgtcgccatggtggaactgacggttaaattgcggatcgttgcgatgttgccacatctgatcatactcagcgcgacgttgttcatcacttaacacttcccaggcttcagcgacctctttgaagcgggcttcggcatccggttctttgctgacatcaggatggtatttgcgggcaagtcgacgataggcggtcttgattgtcttgagatcgtccgtcggtttcacgcccatgatggcgtaataatcctttaattccatagcgttatctcgcgtaaatcaacacaaattgaaggaacccctgtaaggtaactcctataagtgtagggtaatcctcaaaatttcatatgccaacacagaatatgttattgaaatcatcgcggagaggaggtcgccatcaagatgggttgctgaacatattttaaacaggtgaaaaagggtgagcgatttttgatagttgaaccaggcactttaagtttaactagggcgtcattatttattaaattttatagacgctatatatgggtagtaatatacatggaattagttgcactgcaaataattatttgaaacaggcctggaacgatataaaaaatgagtacgaaaaaaatcaaacatatagtatcacgctttttgaaaacacactggtgtgttttatgcggttatacaatgaactcagacgtaaagtaaatgaagaggatactccatgtctggaatgtgaaagtctagaaaaagaatttgaggaaatgcagaatgataatgatctaagtttatttatgagaatattgcgtactaatgatacacaaatttatagtggggttagtggaggtattacatatactatacaatatgttcgagatattgatattgttagagtgtccttgccgggcagagctagtgagtctatcacagattttaaaggttattattggtataactttatggagtatattgaaaacattaatgcgtgtgatgatgttttttctgagtattgttttgatgatgaaaatataagtgtccagccagagcggataaatacgccgggaatatctgatttggattctgacattgatttgtctggtatatcttttattcagcgtgaaactaaccaggcattaggattaaaatatgctcctgtagatggcgatggatattgtctgttaagagctatactggttttaaaacaacatgattatagttgggcgctggtcagttataagatgcaaaaggaagtttacaacgaattcattaaaatggttgataaaaaaacgatcgaggctcttgttgatacggcattctataatctcagggaagatgtaaagacgttatttggcgttgatctacaatctgacaaccaaattcaggggcagagtagtcttatgagttggagctttctgttttttaaaaaacaattcattgatagttgcttgaataacgaaaaatgtatcctgcatttacccgagtttatatttaatgataacaagaacttgcttgctttagataccgacacgagcgataggattaaagcggtgaagaattttcttgttgttcttagtgatagcatttgcagtttatttattgttaatagtaatgtggcaagtatctccttggggaatgaatcctttagtacagatgaagatcttgagtatggttatttaatgaacactggcaatcattatgacgtttacctccctcctgaactttttgctcaggcttacaagttaaacaataaggaaatgaatgcgcaactcgactatttaaatcgttatgcaatttaatggcaaaggcatatgctaaaaaccattgttattagtctcacacttttttattggtaaatattgtctctgtattggtaacgccgcagatattctgtttagccacaggtgcaattatcagcggcgtacgcgaggcaggggctaatcaggcatagtttgcgtcaaaccttgcctgtttttgaagatgtatatagaaaaacaggcgttcaacaagccattttgcgaacctgttcccggaaaaaagtcatatttctgtcacactctttagtgattgataacaaaagaggtgccaggaatgaacaaaacgctaatcgccgcagctgtggcagggatagttttactcgctagtaacgctcaggcacaaaccgtaccggaaggctatcagctacagcaagtgctcatgatgagccgccataacttacgtgcgccgctggcgaacaatggcagtgtgctggagcagagcacgccgaataaatggccagaatgggacgtccccggtgggcaactcaccaccaaaggtggcgtgctcgaagtgtatatgggccattacatgcgtgaatggctggcagagcaggggatggtgaaaagcggggaatgcccgccgccgtacaccgtttatgcctatgccaatagtctgcaacgtaccgttgcgaccgcacagttctttattaccggcgcattcccggggtgtgatattcctgtgcatcaccaggaaaaaatgggcactatggacccaacctttaacccggtgatcaccgatgattccgccgcattcagtgaacaggcggtggcggcaatggagaaagagctcagcaaactccagcttaccgacagctaccagctactggaaaaaatcgttaactataaagattcccctgcctgtaaagagaaacaacagtgtagcctggtggatggcaaaaatacctttagcgccaagtatcaacaagaaccaggtgtttccgggccgctgaaagtcggcaacagcctggtagatgcgtttactttgcaatattacgaaggttttccgatggatcaggtggcctggggagaaatcaaatctgaccagcagtggaaggtgttgagcaagcttaaaaacggctaccaggacagcctgtttaccagtccggaagtggcgcgcaatgttgcgaaaccgctggtcagttatatcgacaaagctctggtcaccgatcgcaccagcgcaccgaaaattacagtgttggttgggcacgactccaacattgcctctctgttaacggcgctggatttcaaaccgtatcagttgcatgaccagaacgaacgcacgccgattggcggcaaaatcgttttccagcgttggcatgacagcaaagccaatcgcgatttgatgaaaattgaatatgtgtatcagagtgcggaacagttacgtaatgccgatgcgttaaccctgcaggcacctgcgcagcgtgtgacgctggaattaagcggttgcccgatagacgctgatggtttctgcccgatggataagtttgatagcgtgttgaatgaagcggtgaaataacagaaaactcccccgcgagaagcgggggagtcgctggttaaacgtttttacgttcgatggtctgttcgccccaaaaaaggctatctttatcggtcttagcaaaggctttgactaacacttcatcactaccttcttcccaaatcttttccgccattttttcgtcgtacccggcgacttcgaaaatggcctcggctatttccgggctcgtattgcgcagagatgcccattcaccgacgtgatgagctttcgcttcttgagttggcatgcgtatcctcctgttgaagattagccgttaagtttaactgccagacctgcgacatattccccttgataacgagcaatagacagttcttcctggctgggctggcgactaccgtcaccgcctgcgatggtggttgcgccgtacggcgtaccgccgcgaacctgactaacgtcaaataattcctgcgctgcgtagccaatagggacaattaccatgccgtgatgcgcaagggtcgtccaggtggatgtgatggtttgttcctgaccgccgccagtaccggtggaactaaagacgctcgccagttttccgtatagtgcgccggaagcccacaggccgcccgtctggtcgaggaaggtacgcatttgaccggacatgttgccaaagcgggtaggtgtaccaaaaataatggcgtcgtaatcggccagttcttgcggggttgcaaccggtgcagtttgcgttttaccgcctgctttttcaaataattgcggcggcatggtttccggtacacgcttaacgacaacttcagcgccatccactttgcttgcaccctcagcgactgcgcgtgccatcgtttcaatatgtccgtacatggaataataaagcaccagaactttagccatttctaaccactcctcgtgttatctctattccgtagcgattcgctaccacttatttaaagataagacgtccttttcagagtgcaaatttcacaaccacttatttgatttataacaactttcacaagcacgtaattttgtcgcaaaatgacacatttttatctcatcgcgtttttttaatcataagagcggcttatggataattattggagatgatatctattctcgctaagaagctgttgcaggatattaccaaacgcgggtctgcccgcgtcagttcactaagcttagtcccacgtagcgaaaatatggcagccgccatacgccgcgttaattctatgcaatatgatgtctatacccagacggaggtcagtaatggcaaaccatcgaggcggttccggcaattttgcagaagaccgcgaaagagcaagtgaagcaggtaaaaaaggtggacagcacagcgggggtaatttcaagaatgacccgcagcgcgcatctgaagcaggtaaaaaaggtggtaagagcagtcacggcaaaagcgacaactaaccgggctaatcaatgacgaatgcatttttgtctgtagctcgtcaaaaagccatcaccgccggttacccggtggttgatactgatgacaaatgtaagcttgcctgatgcgcgatgcttatcaggcctaccagaagattgcaatatattgaatttgcactgttttgtaggccggataaggcgtttacgccgcatccggcatgaacaatgcgtacgttgtcaacaatctgcaccgccggtaaccccggcggttttctgtttatggctcctgatgaacaacttctggcggtggaacgtcaaccaactttctgcttaacaacgcattgagtaaaatcgcgccaaaggttgctgtaccaatccctcccaacgtaaaaccgcccagcgtgagagcaaaatcacccgcgcccagcactaaggttactgcgaccataatcaaattaccgttctggcttaaatcgacacggttttgtacccatatccttgcgcctgcgacggcaatcagcccgaacacaacaatacttgcaccaccaataaccgcggccggaatggtatgaatcagcgcaccaaatttcggactaaagcccaacagcatggcgatgacggcagcagcaacaaacaccagcgtgctgtagactttggtcacggccatcacaccgatattttcagcataggtggtcacgccgctaccgccgacagagccggaaagcatcgttgccagaccatcgcctacgaatgcccgccccatatacgggtccatattgcgtccggtcatcccggcgactgccttgagatgacctaagttttccgccaccagaatcaccgccacgggcgcaatcagcatcattgcctgaccattaaaagcaggagtggaaaaatgtggcagaccgaaccaggcagcatggctgacgagagtaaaatcgacggcttttcccagccctaaaacgttggtcatcacgccatacagcagacaggcgacaattaatcctacgagaatcaataaccgctggatcatgccacgggtaaacaccgccaccagcccaatacacagcaccgtcattaccgccatccagctatcaaaggcgctagcgcttacacttttcactgcgataggcgctaagttcaggccaatcgccatcaccaccgcacccgtcaccaccggcggcatcagtcgttcaatccagcgcgtaccgattttcatcaccaccaggccaatgacggtataaaccagcccacaggcgataatcccgcccagcgcaatgctgatattcgggttaatgccctgaccgttaaagcccgtcgcggcgatcaccacgccgacaaaagccgcgctggagccgagataactggggacgcgcccgccggtaataaagaaaaacagtaacgtgccgatcccgctcattaaaatggaaagattgggatccagccccatcagaatcggcattaacaccgtcgcgccaaacatcgccaccgcgtgttgaacgcccattactgccgtctgagcaaacggcaatcgttcatccggcgcgaccacgccgctctctgtagaggtgctttttaactgccagtgaggaaaaccgaacattgccatcagctgtctccttaaggaggttaacaagcagggcgcatcagcgcgtgataactgcgatcgaaccacaccagcccgtagggtgtggtgtgacgatgaatcgcttcgatggcgcaaaacagaatgtcgtgggtgccgacgctcaccacctggctgatacggcagtcaaagctaaccagagcctcttccagttgcgggcatccggtcacccccgtctgccagcgggcggcggcaaagcggtgttccatgggcgttttgccgccaaaaaggttactaagcggctcctgcccggcgctaagtgtatttacacacagcgttcgattttcattgaatgccggccagacggacgccccacgattcaggcacaccagtaatgtgggcggcgtatcggtcacactgcagacggcgctggcggtgaacccggcgcgcccggctggaccgtccgtggtgataatattgaccgccgcgcccatgcaggacatcgcatcgcgaaaagtttgttgatcgacaatgttcatagtttgctccttacaacagcccgcaggcttcttcaaaggacagacgtggcaggcgcgcataaagcttgctgctatcgccatagccgatattaatcagcagattgctcttcagcgtgctgcccgtaaaaaaggcgtcgtccacgtgttgacggtcaaagccgctcatcgggccggtatccagtcccagcgcccggcaggcgacgatcagataggccgcctgcatggaactgttgcgaaacgctgtttcttcggcaagttgtgggctggaggtaaaccaactgcgggcatcaccgtggggaaacagtagtggtaaccgttcataaaattcactgtcccaggcgacgatagcggtgacgggcgcggtcagggttttttgcagattgccgctggaaagtgccgggcgcagacgttcttttccttctgccgtgcgggtaaacacgatccgtgccggagaacagttagcacttgtcggcccccatttcatcagggcataaatctcccgtaacgtctcatcgctgacgggtgtctcccgccagccgttgtgagtgcgggcatcggtgaacagggtgctaagcgcacctgggctaacggcttcgttcatagcaattccttacagggcggcttcacggtgatgtaacaggctggcaagcccgttgagtaacagagcattaaacgtttcgggatcggtcacgttgcaggcgtgtccgccatagggcatcaccattttctggctatcgggcagggcggcatgaagttcactggaacatgctgttggcaccagcagatcatcactggcgcagatgatttgcaccgggcagcggatgcgatccgcatggtgactaaagtcagcgcgtttgagggcgttaagtcgacgcagtaaattatttttgccctgaaaatgcgccagtgccagcgcgtcttctgcctccaggcgaggtgcgcgggccgccatccagtcggcgggatagaggaacaacggctgcgcttccacccatgcctgcgcgccgccgctatacagtaatcgttcgcgaacctgaaaacagcggcgcgtatgggcgtttattcgtagccagccgttaacgctgatcagcacagttacgctcgcgggataatccagcgccagctgcattcccaccagcgcaccgagcgcatggccgaccactgcgtaatgctcaatccctgcggctaccagcgcctgatgcagttccgctgccatctgggcgatactgtaatcttctgccagcgtgtcgggattattgccggtgccgcgctggtcgtaacagactacctgatactcctgctccagcaccgccagttgcggtaaccagtaactgccgctacccccaagaccgctaatcaacaccactacgggcgcatcagcataagggggaggactgagactaagtttcatcgcggcctcacttggcgatatgcgcaattgtggcgatttccaccagcgcgtcaggttttaccagtccgcactgaatgcagaatcgcgccggtttatcacccggaaaaaactcggcgtagatttcgttaatcgcggcgtaatttttccagtcggtaataaagatgctgttgaaggtcacatccgccatcgtgccacccgccgtctcgatcaccttgcggatagtttccagaacgtggcgggtttgcgcctttgggtcatcggcaaacagcacgttattatgttgatcaaaagccagcgtaccggagacatacaccacgccatcagccagcgtgccgggaacgaagggggccagcggtgcgctgctgccagcgggaataattacggattttggcatcgttaaactccttaagcgatatgagcaaaggacgtgggagaaagcgcgtcgcagaatgtttcgacgtcgctgacccagccaaaaaaggtttcgatattgaacaacgcggctttctgcgcaaatttcggccccgcctggtgagttgcgtcttcaagcaccacgccgaaatactccagaaaaaagccgtcgcgtagcgtgctttcgacgcagacgttggtagcgatgccggtgaaaaccagatggcgtattccgcggctgcgcaaaatgctgtccagcggcgtattgaagaaaccgctgtagcgcggcttcggcagcacaatatcgccaggctgcggcaccagttcatccaccagttgataatcccaggagcctttcgccagcaatttcccctgcagctgcggctgcttacgcatggttttcagggcgttgcttttatgaaaattcggactgccgggtccgccagcctcgacatactgttcatcccagccattttgaaaccagatgatcagcatccctgccgctcgcgctgcggtcacggcggtttgaatgttggcaatgaccgggcgagtggtactgacatcaaacccggcgagatctaagtagccgcctggcgtggcataagcgttttgcatatccaccacgatcagcgcactttgctgcggatcgaaggtaatggcttccggtcgagcggttaaggtcgtcatcatgccacctcctgagtcagcgcaggtagatgggcgcggcattgcatcagtggttgaatgcgctcgccgaaggtttcgattccgctcagaaaatcgtcgaaggttaacagcacgccttcggcaccaggcacgcttgcgacttcatctaacatgcgcgcgacactggcgtaagaaccgactaacgtccccatattgatgtttaccgcgctagtgggatcggccatctgacgaacgttggtgtcagtaccggagcgggtatctttctgactttgttcggttagccagcttaacgcctcttcatccgcgcccgctttgtagtgttcccatttggcgcgagcggcatcgtcggtttcatcggcaatcaccataaacaacacataagagccaacgtcgcgtccggtttgctctgcggcctgtttcatccgcgcagcggtcggggcgaaagccgtgggtgtatttacgcctttgccgaaacagaagttgaaatcggcataccgggcggagaacgccatgccagcgtcgctttgcccggcgcagatcactttcatggggacactcggttgcggactcacgcgacaatcattcatggtgaaaaaatcgcctttaaaatcgcttttccccgtgccccacaggtcgcgcagcacctgaacatattcggtgagatagtcgtaacgacgggagaaatagtcatcgccaggccagatacccatctgctcatactcgggcttttgccagccagtcacgaggttgacgccaaaacgcccgccagagatggagtcgatggttgcggccatacgggcgacgattgccggaggtaacgttaaggtggcagcagtggcgtaaatctgaatgcggctggtcacggccgccagccccgccatcaaggtgaagctctcaaggttgtgatcccagaactcagttttgccgccaaagccacgcagtttgatcatgctcagggcgaaatcgaaatggtagtgctccgctttttgcacaatggctttattcagttcaaaggtcggcatgtactgcggcgcgtgggtgctaatgagccagccgttgttgccaataggtacgaatacgccaattttcatcatcaacctctcttcgtctcgtaaagtgaaagtcagacggggcgctgcatcctgcatatccttttcagccgcgtattggcttgtttgcaaagcggatgccagtttttaaaaagttaatgttattaatctgttaacattacgttatctaaaatatctggtaaaaagtggactaaacggtcaaaacagttgcacataaaacatgcatctgtgcgcgatgagagtgcagaaggtcgaggccgggcgggggttttgctatcctgttgccaatctacaagaggggagagcgcatgacgcaaggcgcagtgaaaacaacgggtaaacgtagccgcgcagtaagcgcgaagaaaaaagcgattcttagcgcagcactggacacttttagtcaattcggttttcacggcacaaggctggagcagatcgcagagttggcgggtgttagtaaaaccaatctgctgtattactttccgagtaaagaggcgctgtatattgccgtgctgcggcagattctcgatatctggctggcaccgttaaaagcgtttcgtgaagatttcgccccgctggcggcgatcaaagagtacatccgtctgaagctggaagtcagtcgcgattatccgcaggctagccgcctgttctgtatggagatgctggcaggcgcgccgctgttaatggatgaactgacgggcgatttgaaggcattaattgatgagaaaagcgcgctgattgccggttgggtcaaaagcggcaaactcgcgccgattgatccgcagcatttgatttttatgatttgggcttccactcaacattacgccgatttcgcccctcaggtggaggcggtgacaggcgcgacgttgcgcgatgaggtatttttcaatcaaacggttgaaaacgtgcagcggattattattgaggggattcgaccacgttaaagatgccggaggaggttgtaacatcctccggctacctgtttaacctatagtcattaagctggcgttaccgccagcggcagcggtattcacactcaggctacgctcgatatacagccgttccagaaggatattgctttcgccacgggcaaaaccctgcacgctaacaattgtgccatcccgcgcggcaactgcttcacacaatgcgcgaagctgatcgctatcaccgtggaagatcaccgcatcaaacggttgagcggttatattttccgctttcgccagttgaatacgttcgctgactgcgcttggcaatgccttcactaactgacgatgcagcgcgtcatccggccacagtacctggctgcccaccgccagcacggcggcgagctgagtcagcgcatcctgctcatcatcggcaatacacaacacgcgctcacgcggcagcagcgtccaggtgttgcgttcacccgtcggccccggcagcaatcgttgtgttcctgcctgcgccagctcgccatattgcgtacataacgcctgcaattctggacgatttgctgcccattcccgcagtgcatttagcggctgagtcaatgcggctttcaactgcgcatcgaccggatactttgcatcctgacgcgcgagcgtcactgccagcgcactttccgggcgattcgccagcagacggtagagatagagcggaccgcctgctttcggcccggtaccggacaacccttcgccgccgaacggctgcacaccaaccactgcgcccaccatattacggttaacatacaggttaccaacatgggcgctgccagtgacctgggcgatggtttcatcaatgcgcgtatggacgccaagcgtcagaccataaccggaagcgttaatctgctcgatcagctctggtagctggttacggttgtaacgcaccacatgcagcaccggaccaaagacctctttttgcaattcggcaaagtcatccagttcgatcagcgtcggggcgacaaaggtgccgctttgccattcacgggcatcttcgctgttttcccgcaccgcctggaacaccggacggcctttgctacgcatggtctgaatatggcgctcaatattggctttcgcttcgctatcaatcactggaccgatatcggtggtcaggcgacccggattacccatccggcattcggccattgcgccgcgcagcattttcaacgtgtggtcggcaatctcatcttgcaggcacagcacgcgcagcgcgctacaacgctgacccgcactgtcgaacgcgctggccagtacatccacgacgacctgttcggtcagtgcactagaatcgacaatcatcgcgttcatgccgccggtttcagcgatgagcggaatagggcgaccctgagcgtccaggcggctggcgatattgcgctgcagtaacgtagcgacttcggtactaccggtaaacatcaccccgcgcacgcgatcatcacccgtcagttgcgcgcccacggtttcaccccgacctggcagcaattgcaccacgcctggcggtacacccgcttccagcaaaatggcgatcccttgcgcggcaatcagcggcgtttgttctgccggttttgccagcacgctgttacctgccgccagtgcggcggcgatctgcccggtgaaaatagccagcgggaagttccacggactgatacacaccacaggccctaatggacggtgggtttcgttagcgaaatcatcccgcacctgtccggcgtagtagtggagaaaatcgaccgcttcgcgcacttcggcaatggcgttactgaaggtttttccggcctcacgcaccagaataccaatcagttgctgcatctggctttccatcagcacggcagcgcggtgcaaaatcgctgcgcgttcagccggaggcgtggcaaaccagattggcgcgttattaaccgcactttccagcgcctgttctacttcacgcggcgtggcttcacgcacatagcccacaatatctttcggttccgcagggttaataacggggctcatctcacctgccgctaccggttgttccagcattggcaaggcctgccatttttgcagtgcactattgagcagggcagaggagaggctggccaggcggtgttcgttagcgagatccagccctgcgctgttgtcgcgcccgtgaccgtaaagatcgcgcggcaggggaattttcggatgcggtaatccagtttgcccttcctgttgcgccagtttttctacagcagtgaccggatcggcgaccagttcatccagtggcaaagaggtgtcggcaatacggttaacaaagctggtgttagcaccgttttccagcaggcgacgcaccagatacgccaacagcgtttcatgtgtgccaaccggagcataaatacgacacggacggttaagtttgccgtcggcaactttcccggggacctgctcatacagtggctcgcccataccatgcaggcactggaactcgtactgacccgggtagtagttctgccccgccagttgataaatcgccgccagcgtatgggcgttgtgcgtcgcgaactgcgggtagattagattcggcaccgccagcagctttttcgcacaggcgagataagaaacgtcggtatacaccttgcgggtataaaccggataaccttcaaggccgtccatctgcgcacgcttaatttcactatcccagtacgcgcctttcaccaggcgaatcatcagacggcgacggctgcgggtggcgagatcaatcaggtaatcgatcaccaacgggcagcgtttttgataagcctgaataacaaaaccgatgccgttccagcctgccagttccggctcgaaacagagtttttccagcagatcgagggagatctccaggcgatcggactcttcggcgtcaatgttgataccaatatcgtactgacgcgccagcagggtgagacttttcagacgcgggtaaagctcttccattacccggtcatactgggcgcggctataacgcggatgcagcgcgctcagtttgatactaatgcccggcccttcatagatgccacgaccgttagacgctttaccgatggcgtgaatcgcctgctgataggaaaccatatacgcctgtgcatctgcggcggtcagcgcggcttcgcccagcatatcgtaagagtaacggaaacctttctcttccagcttgcgggcattggctaacgcttccgcgatggtttcgccagtgacgaactgctcacccatcaggcgcatcgccatatccacacctttgcggatcagcggttcaccgcttttaccgataatgcggttcaggctgcgggagaggctggcttcgttatgggtggaaaccagtttgccagtaaacagcagcccccaggtggcggcattaacaaacagactcgggctacgaccaatgtgactctgccagttaccgttgctgattttgtcgcgaattaacgcgtcgcgggtggctttgtcgggaatacgcaacaacgcttccgccagacacatcagcgccacgccttcctggctactcaggctaaactcctgcaataacccctggaccatacctgcgcgaccactggcatttttttgattacgcagtttatcggccagctgatacgccagtttgtgcgcctgttcagcaactggctgcggcaggcgggcttgttccagcagcatagaaaccgcttcggtttccgggcggcgataggccgcggtgatcgcggcgcgggaaacgctctggggcaatatttgctcggcaaagtcgaggaatggctggtgtggttcctctgccggagtcggtgcttcatcgctctcattggccgcgccagaaagcagcgcaggtagctccggcagagtatcgctgttttccagttgttcgagataagaaaaaatcgcctgcttaattaaccagtgtggtgtgcgatcgatacgtgtcgcggcagacttaatacgctcacgcgtcgcgtcgtccagcttaacccccatggtggtggttcccatgccattactcctgttgttcagaaaggtgcaacttaacgttatcgtgaaatatccatgatgttgcaactttgtgcaaccatgttaaatgtgacatgcgtagcaagcttaaaaatgaatgaaatgttaataaaagaaatcgatatgacagggattaaaaaaataactcagactttttctctgcggcagttaacatttttgaaaggtgcaaccgcaaaaaatgtgagagagtgcaacctgatgaaaaatagtgtcgctgagcactaaaatttaatgtaaatggtgtgttaaatcgattgtgaataaccagcgcttccggcaggatacggtcgccctggtaaaacataaactctgttaccccgttccggtggcagatataacggcaagtttcgacattgccgataataattttttggagactttagatggctattagcacaccgatgttggtgacattttgtgtctatatctttggcatgatattgattgggtttatcgcctggcgaagtacgaaaaactttgacgactatattctgggcggtcgtagtcttgggccattcgtgacggcattaagcgcgggtgcgagcgatatgagcggctggctgttaatggggttgccgggcgctgtttttctttccgggatttccgaaagctggatcgccattggcctgacattaggcgcgtggattaactggaagctggtggccgggcggttgcgtgtgcataccgaatacaacaataacgccttaacactgccggattatttcaccgggcgctttgaagataaaagccgcattttgcgcattatctctgcgctggttattttgctgttcttcaccatttattgcgctagcggcattgtggcaggcgcgcgtctgtttgaaagtacctttggcatgagctacgaaacggctctgtgggcgggcgctgcggcgacgatcctttacacctttattggcggtttcctcgcggtgagctggactgacactgtacaggccagcctgatgatttttgccctgatcctgacgccggttatcgtcattatcagtgtcggtggctttggtgacagcctggaagtgatcaaacaaaagagcatcgaaaacgttgatatgctcaaaggtctgaactttgttgccattatcagtctgatgggttgggggctgggttacttcgggcagccgcacattctggcgcgttttatggcggcggattctcaccacagcattgtccatgcgcgtcgtattagtatgacctggatgatcctctgcctggcaggggcggtggctgtcggcttctttgggattgcttactttaacgatcatccggcgttggctggtgcggtaaatcagaacgccgagcgtgtgtttatcgaactggcgcaaattctgtttaacccgtggattgccgggattctgctgagcgcaattctggcggcggtaatgagtaccttaagttgccagctgctggtgtgctccagtgcgattaccgaagatttgtacaaagcgtttctgcgtaaacatgccagccagaaagagctggtgtgggtagggcgtgtgatggtgctggtggtggcgctggtggcgattgcgctggcggcaaacccggaaaaccgcgtgctgggcttagtgagctacgcgtgggcaggctttggcgcggcgtttggtccagtggtgctgttcagcgtgatgtggagtcgcatgacgcgtaacggtgcgctggcggggatgatcatcggtgcgctgacggttatcgtctggaaacagttcggctggctgggactgtacgaaattattccgggctttatcttcggcagtattgggattgtagtgtttagtttgctgggtaaagcgccgagtgcggcgatgcaaaaacgctttgccgaggccgatgcgcactatcatagcgctccgccgagtcggttgcaggaaagctaagggacttagcctgcggcggttttgtttggcttcagcagcgggttgcgctcccttaatgtgcctcgccatataaattgaatggtgcagggagcgcgcagggggcggccaatcgccgccgccccctgctgtcccggccttcggggaacgcttcagcgattttgacgccaccaacacccgagctgttattatgttccgggcaaaaagttagatttgataatcgcggatggacgaaattgcttgatacacccgcttatcagttttacatggaagctctgatgcattgagtctggacagttttgtcggctggatacggcgtttacgcggcatccggcaagaacacatggttctttgcaaacaatcccatctttctaccctggaataatcgtttatatcccttggcattacctctctttgtttacattccaacatcattttataaacattccgcttgtgtttttctttgccgtaatgataatcgctatcactgcgatttacttttctttgcatagattgactcagaaaaacgtttaagggtgggtggcatgtttgttccgtttctcattatgttgcgcgaaggacttgaagccgcgctgattgtcagtttgattgccagctatcttaagcgtacccagcgaggccgatggattgtgtgatgtggattggcgtgttgcttgccgctgcgttgtgcctgggcttgggtatcttcattaacgaaaccaccggcgaatttccgcaaaaagaacaggaactgtttgaaggtatcgtggcggtgatcgccgtggtgatccttacctggatggttttctggatgcgcaaagtgtcgcgcaacgtcaaagtgcaactggaacaggcagtcgatagcgcattgcagcgtggaaatcatcatggctgggcgctggtgatgatggtcttttttgccgttgcaagggaagggctggagtcggtctttttcctgctggcggcatttcaacaagatgtcgggatctggccgccgctgggtgcaatgctcggtcttgctactgccgtggtgctaggcttcctgctctactggggcggtattcgcctcaatcttggtgcattttttaaatggaccagcctgtttattctcttcgtcgccgcagggctggcagctggtgccattcgcgcatttcatgaagccggattgtggaaccactttcaggaaatcgccttcgatatgagtgcggtgctctcaactcactcgctgtttggcacgctgatggaagggatttttggctatcaggaagcgccgagcgtcagcgaagtcgccgtctggtttatttatctcatcccggcgctggtggcatttgctctgccaccacgcgcaggggcgacagcgtctcgctccgcgtaacaaatacgacgcaaactcttgcttagttacaacatactttaaagggatagtctcgtcatgaccattaacttccgccgtaacgcattgcagttgagcgtggctgcgctgttttcttctgcttttatggctaacgccgctgatgtgccgcaggtcaaagtgaccgtgacggataagcagtgcgaaccgatgaccattacggttaacgccgggaaaacacagttcattattcagaaccacagccagaaggcgctggagtgggagatcctcaaaggcgtgatggtggtggaagagcgggaaaatatcgcccctggctttagccagaaaatgacggcgaatttacagcctggcgaatacgatatgacctgcggtctgctgactaacccgaaagggaagttgatcgtcaaaggtgaggcaacggcggatgcggcgcaaagtgatgcgctgttaagtcttggtggtgcaattactgcatataaagcgtatgtcatggcggaaaccacgcagctggtgaccgacaccaaagcctttaccgacgcgattaaagcaggcgatatcgaaaaagcgaaagcactgtatgcaccgacgcgccagcactatgagcgtattgaaccgattgctgaactgttctccgatctggatggcagcattgacgcccgtgaagatgattacgagcaaaaagccgccgacccaaaattcactggtttccaccgtctggaaaaagcattgtttggcgacaacaccaccaaagggatggatcagtacgctgagcagctttataccgatgtggtcgatttgcaaaaacgcatcagtgaactggctttcccacctagtaaagtggtcggcggcgcagccggactgattgaggaagtggcagccagcaaaattagcggtgaagaagatcgctacagccacaccgatctgtgggatttccaggctaacgttgaaggcagccagaaaattgtcgatttgctgcgtccacaactgcaaaaagccaacccggaactgctggcaaaagtcgatgccaactttaaaaaggtcgataccattctggcgaaataccgtactaaagacggttttgaaacctacgacaaattgaccgatgccgaccggaatgcactgaaaggaccgattactgcgctggcggaagatctggcgcaacttcgcggtgtgctgggactggattaagcgttatgcagtataaagatgaaaacggcgtgaatgaaccgagtcgccgacgtttactgaaagtgataggtgcactggcgctggcgggaagttgtccggtcgctcatgcacaaaaaacgcaaagtgcgccgggtacgcttagtccggatgctcgcaatgagaaacagccgttttatggtgagcatcaggcagggatcctgacgccacaacaggccgcaatgatgctggtggcgtttgatgtgcttgccagcgataaagccgatcttgagcggttgtttcgcttgttgactcagcgttttgcttttctgactcagggcggagcagcaccagaaacgccaaatccgcgcctgccaccactcgattccggcattcttggcggctacattgcgcccgataatctcaccatcacgttaagcgtgggtcacagtttgtttgatgagcgctttggccttgcgccacagatgccaaaaaagctgcagaagatgacgcgtttccccaacgacagcctggatgcggcgttatgtcatggtgatgtgttgctacagatttgcgccaacacccaggacacggttatccatgcgctgcgcgatatcatcaaacacacgccggatttgctcagtgtgcgctggaagcgggaagggtttatttccgatcacgcggcgcgtagtaaaggcaaagagacgccgattaatttgctgggtttcaaagacggcactgccaatcccgatagccagaatgataagttgatgcaaaaagtggtgtgggtaacggcagatcagcaggagcctgcgtggacaatcggtggcagctatcaggcagtacgcttgattcagtttcgagtggaattttgggacagaacgccgctgaaagaacagcagacgatttttggccgtgataagcaaaccggtgcgccgctgggaatgcagcatgagcatgatgtgcctgattacgccagcgacccggaagggaaggtgatcgcgctggacagccatatccggctggcgaatccccgcacggcggagagtgagtccagcctgatgctgcgtcgtggctacagttatagtctgggcgtcaccaactccgggcaactggatatggggttgctgtttgtctgctaccaacacgatctggaaaaaggcttcctgacagtacaaaaaaggctcaatggcgaagcgctggaggaatacgttaaacctatcggcggcggttatttttttgcgctgccgggggtgaaggacgcgaacgattatttcggaagcgcgttattgcgggtttaatgtttttaggcggataaggcatttgtgcgcagatgcctgatgcgacgcttgcgcgtcttatcatgcctacaatcagtgcgggtttggtaggctggataaggcgttcacgccgcatccggcgatcgtgcactgatgcctgatgcaaatcctgctgaaagcacacagcttttttcatcactgtcatcactctgtcatctttccagtagaaactaatgtcactgaaatggtgttttatagttaaatataagtaaatatattgttgcaataaatgcgagatctgttgtacttattaagtagcagcggaagttcccggcagtgatagtcagtcactatggagatcgcggatggtaacgtcctgtactggacatgttttagataatcaacgcgccaccactcgcggagttttctcctccggtagtcatctcgtcactttgcattttcaacctcatcctttctttagttgtgttaccgacgccgtaaacggtgcgcgtagccgttttagcgcattttatccaaaagcaaactatggcttacaaggaagccaaccctctgatgttcgtgcgcataatcgcgctgccaacggcgcgtgtgatgaatacaaacaactcaaggtgctctccatgggaagacaaaaagcagtgatcaaagctcgtcgcgaggcaaaacgtgtgctgagacgggatagccgcagccataagcagcgtgaagaagaaagcgtcaccagccttgtgcagatgggcggcgtagaagccattggtatggcccgcgacagtcgcgatactagccccatcctcgcgcgaaatgaagcgcaattgcactatctgaaggctattgagagtaagcagctgatattcgccacgggcgaagccgggtgcggaaaaacctggatcagcgcagcaaaagcggcagaggccctgatacataaggatgtcgacaggattatcgtcacccgtccagttctgcaagccgatgaagatcttggcttcttacctggagatatcgcagaaaagtttgctccctattttcgcccggtctacgacgtgctggtccggcgcttaggggcttcctttatgcagtactgcctgcgaccggaaatagggaaggtggaaattgcgccgttcgcctatatgcgtggacgtacctttgaaaatgcagtcgtcattcttgacgaggcgcagaatgtgactgccgcgcaaatgaaaatgtttttaacccgcctcggggagaacgtgacggttatcgtcaacggtgatatcacgcaatgcgatttgcctcgcggcgtgtgctccggattaagtgacgcgctggaacgtttcgaagaagatgaaatggttgggatcgtccggttcggtaaagaggactgcgtacgtagcgcactttgccaacgtacgctgcatgcctacagttaagtgtgttatcggtgcagagcccgggcgaaccgggctttgttttgggtgttcccggtgtgtgcaatatacgaaaaaaaagcccgtactttcgtacgagctcttctttaaatatggcggtgagggggggattgactcgcttcgctcgccctgcgggcagcccgctcactgcgttcacggtctgtccaactggctgtcgccagttgtcgaaccccggtcggggcttctcatccccccggtgtgtgcaatatacgaaaaaaaagcccgtactttcgtacgagctcttctttaaatatggcggtgagggggggattcgaacccccgatacgttgccgtatacacactttccaggcgtgctccttcagccactcggacacctcaccaaattgtcgttcctgtcttgctggaacgggcgctaatttagggaaatcatgacctgaggtcaacaaactttttgaaaaaatcgcgcgtttattcaaacttcaatcaatgtgtggttttaataagcgaaatctgctttttttgccaccgaccacggatttgttatgctggtggcctttgtagatcataacgataagtgcgaataaatttcgcacaacgcttttcgggagtcagtatggatatcatcttttatcacccaacgttcgatacccaatggtggattgaggcactgcgcaaagctattcctcaggcaagagtcagagcatggaaaagcggagataatgactctgctgattatgctttagtctggcatcctcctgttgaaatgctggcagggcgcgatcttaaagcggtgttcgcactcggggccggtgttgattctattttgagcaagctacaggcacaccctgaaatgctgaacccttctgttccactttttcgcctggaagataccggtatgggcgagcaaatgcaggaatatgctgtcagtcaggtgctgcattggtttcgacgttttgacgattatcgcatccagcaaaatagtagccattggcaaccgctgcctgaatatcatcgggaagattttaccatcggcattttgggcgcaggcgtactgggcagtaaagttgctcagagtctgcaaacctggcgctttccgctgcgttgctggagtcgaacccgtaaaagctggcctggcgtgcaaagctttgccggacgggaagaactgtctgcatttctgagccaatgtcgggtattgattaatttgttaccgaatacccctgaaaccgtcggcattattaatcaacaattactcgaaaaattaccggatggcgcgtatctcctcaacctggcgcgtggtgttcatgttgtggaagatgacctgctcgcggcgctggatagcggcaaagttaaaggcgcaatgttggatgtttttaatcgtgaacccttaccgcctgaaagtccgctctggcaacatccacgcgtgacgataacaccacatgtcgccgcgattacccgtcccgctgaagctgtggagtacatttctcgcaccattgcccagctcgaaaaaggggagagggtctgcgggcaagtcgaccgcgcacgcggctactaataaagcatcaggattcctgctatccttggcgggaattgaatacaggagagagttatgtatcccgtcgaccttcatatgcataccgttgccagcacacatgcatatagcacattaagtgattacattgcccaggccaaacaaaagggcattaaactttttgcgatcaccgatcatggcccggatatggaagatgcgccgcatcactggcacttcattaacatgcgtatctggccgcgagtggttgatggggtagggatcctgcgcggcatcgaagctaacattaaaaatgttgatggtgaaattgactgcagcggtaaaatgtttgacagcctggatctaattattgccggttttcatgagccggtttttgcgccacatgataaagcgaccaatacacaagcgatgatcgccactatcgccagcggcaatgtgcatataataagccatcccggaaatcccaaatatgaaatagatgtgaaagccgttgctgaagcagccgcgaaacatcaggtggcgctggaaatcaataattccagttttttacacagtcgtaagggcagtgaagacaactgtcgtgaggtagccgcagcggtacgtgatgctggaggttgggtggcattaggcagcgattctcacaccgcgtttaccatgggggaatttgaagagtgtcttaaaatcctcgacgcggtagattttccgccagagcgcattttgaatgtttctccgcgccgcttactgaacttccttgaatctcgcggtatggcaccgattgcggaatttgcagacctttaattactagtaatggaaatatattaatgaacgagttttctatcctctgtcgtgtgctgggtagcctctattaccgccaaccacaagatcctttactggtgccgctgtttaccctgattcgtgaggggaaactggctgcgaactggccactggagcaggatgagttgctgacacgtttgcagaaaagctgtgatatgacgcaagtctctgccgattacaatgcgttgtttatcggcgatgaatgtgctgtgccgccatatcgtagcgcatgggttgagggcgcgacggaagcggaagtgcgcgcttttctttctgagcgagggatgccattagcggatacgccagccgatcacatcggcacattgctgctcgcagcttcctggctggaagatcagagtacggaagatgagagcgaagcactggaaacactgttcagtgagtatctgttaccctggtgtggtgcgttccttggcaaagtggaggcccatgcaaccacgcctttctggcgcaccatggcaccgctaacccgcgatgccattagtgcaatgtgggacgagctggaagaagattctgaagaataagtgtgatctacgtcactcataactgcaacggataatttgttgttgcataaaatgtgtgctcgatctcattcatggccgcgttttctgctatcatgcgcggcatgaacatacttctctctattgcaatcacaacaggcattctctccggtatctggggatgggtggctgtttccctgggcttactaagctgggcgggcttcctgggctgtacggcctactttgcctgcccgcaaggtgggctgaaagggctggcgatctccgctgcaaccctgcttagtggcgtggtgtgggcgatggtcattatttacggtagtgcactggcaccacatctggaaattctcggttatgtcataaccggtattgtcgcgtttctgatgtgtattcaggccaaacagctgctgcttagttttgttccggggacgtttataggcgcatgcgcgacgtttgccgggcagggtgactggaaactggtgttacctagcctggcgcttgggctgatatttggttacgcaatgaaaaacagtggcctgtggctggcggcgcgtagtgcaaagacggcgcaccgtgagcaggaaatcaaaaataaagcgtgaggggcactcacgctttcgcttaaacagtaaaatgccggatgataattccggcttttttatctgtcaggattccggtggaacgctcatatggcggtatttcaccagaatgtcattctgccgttctgctttattttgcaaatcccacagaccacggtcgataccatcattaatcaggaaaatgacccctgtttcgatagcgctcatcaggcacagcataacaggttcgttgctggtgtaacccacttccccttcaagcaagcgctggtagtcaataaagcggaaaaccccggcctgaacttcataggaaagtatcgtcttactggtgttcacgctagaaaggatctcgccggtactcacattgacgacgcgcaggttcacggcaatctgatcgagctggtattgcgtgtcggcaccgatgccaaaatatcttgccccaaccccgccagatttgacgttgctttcataaccgataatgctaccttcaaccatgatatttgccgccgttaaagattgcagcgggattcggttattaatggcaaccgtgccgttttcttgtgccgcacgaataatcttgcgctcgttaagcaggttttgtaagccctggcgctccagcggtataaaccagcgagaatctttcagtgccgtgaccagcattgccgtggcgctttgcggaacagcagtggagaagttacttgccgggtagggtttaaattgcccggtttcgtcctgaatgttgtatacgctaacaaagattttacccgtcggcgctggcagatgggtcaaatctttgtagctctgagcacgaggcattaatgtcggtctggcggcttctttaggcggggcggttaagcatccgctcagtaacatgacggcaaccaaaagaaataagcgctgcatgattattttccttatgaagctggggcttaaaaatcggtactgttattttgtaaaccgctaacctggatggtgctggtttgtccggttttacgatctgtcacgttcaactgcaattgaccatcgcggttggcaatatcgacaatataatcgttggtcaccatgcggcccggtttaccggtattaatattgctcagtagcccacctaaaatttgactctggatggcctgagtaaagttatctaacgcactgggtgtttcaataccaaagtcatcgttatagctcggatctttataagagttttgggcctgagcgctatttaataaaaaagcgccattatttgggttaccaccaaagtttggattacggaactggaaagtcatggttccagcccaacttaatgggctaataagcatgagtagaactactgcatgtttgacacgcattgcagcctccgaacaattttttatttagaattcatcatgcgccaaatcgcccgtacttaataacgcctgatttatctggcgacgatttagtgcttcttcagtttgaatcagtgcaaagacgacagttttctcgaagtctcttttcaacggaaataaaaaagtctggaaaataacgtcctgattgaccgttatagtgatccagcttccccatcgtgcactgggcctttcattaatcgttaagttacccgtatagtcactttcccatttatcactaaaggctcggtaaaaatcatggccaatagaactaacagtatggtcagttagcaatcccgggacttctacctcaacggcgtgaagattccctgcggcgaacagaaattctgccgccacaatccagcgtaaataacgtttcatggctttatcgcctgaggttatcgtttgcccaggaaaccgcttgtgtccggttttttacggctatcttcttgaaaagattataaagatgcgttttaaccgtattttcgctgatgaacaagctacgagcgatctcgttattagacgcgccgatacgcagcttattcaggatctctttttcccgatgagtaaggagggcactttccgtgctgttataacgatagttaccactatgcgtaatcaggtagctggcaagcttttgcgtaaagtagcattcgccgcgcaggacgccttgcaacccattgacaacacgttcttgatcctccatggaataaaaaacgccgttgatatgaggccagttttcaatgtcgcggtacgggtaatcttcaggcgtatttagcaacaatattttgatattgttgtttttcctgctcaaagtatcctgccaataatggataagctttttatccgcttccatcatatccagaagaataatagagccactagagatatcgtccagagaacgttgaatattatgtaattttcctgtaattgccaggctttgtttaaggtgctgcaagagagctgtcgcctgcaaagaagatttagtgatcaacaataatgtatgaccatgaatactatggacttcattaaacatgatgaaaccccgctttttttattgatcgcacacctgacagctgcctctaaaatagaagcaccagaagtactgacagatgttgcactgctgtgtgtagtaataaatcagccctaaatgggtaaaatataaaactaatggattacatctgatttcaatctagccattacaaatcttaaatcaagtgttaaacatgtaactaaatgtaactcgttatattaaaatgttaaccttaaggttttattaagtttagaaatgatagaaaagttgtacatttggtttttattgcacaattttaaaaaatcatacaaatggtgataacttactaataatgcatataaaaaatatttcggtgtagtcctttcgtcatgtaaaacgttcttgttttttctccacacctccgtggacaattttttactgcaaaaagacgaggtttgtcacggcttgtgcgcaagacatatcgcagcaatcagcgacgggcaagaagaatgactgtctggtgctttttgatagcggaaaacggagatttaaaagaaaacaaaatatttttttgcgtagataacagcgtatttacgtgggttttaatactttggtatgaactaaaaaagaaaaatacaacgcgcgggtgagttattaaaaatatttccgcagacatactttccatcgtaacgcagcgttaacaaaatacaggttgcgttaacaaccaagttgaaatgatttaatttcttaaatgtacgaccaggtccagggtgacaacatgaaaaacaaattgttatttatgatgttaacaatactgggtgcgcctgggattgcagccgcagcaggttatgatttagctaatagtgaatataacttcgcggtaaatgaattgagtaagtctagttttaatcaggcagccataattggtcaagctgggactaataatagtgctcagttacggcagggaggcagtaaacttttggcggttgttgcgcaagaaggtagtagcaaccgggcaaagattgaccagacaggagattataaccttgcatatattgatcaggcgggcagtgccaacgatgccagtattagccaaggtgcttatggtaatactgcgatgattatccagaaaggttctggtaataaagcaaatattacacagtatggtactcaaaaaacggcaattgtagtgcagagacagagccaaatggctattcgcgtgacacaacgttaatttccattcgacttttaaatcaatccgatgggggttttacatgaaacttttaaaagtagcagcaattgcagcaatcgtattctccggtagcgctctggcaggtgttgttcctcagtacggcggcggcggtaaccacggtggtggcggtaataatagcggcccaaattctgagctgaacatttaccagtacggtggcggtaactctgcacttgctctgcaaactgatgcccgtaactctgacttgactattacccagcatggcggcggtaatggtgcagatgttggtcagggcagtgatgacagcagtatcgatctgacccaacgtggcttcggtaacagcgctactcttgatcagtggaacggcaaaaattctgaaatgacggttaaacagttcggtggtggcaacggtgctgcagttgaccagactgcatctaactcctccgtcaacgtgactcaggttggctttggtaacaacgcgaccgctcatcagtactaatacatcatttgtattacagaaacagggcgcaagccctgttttttttcgggagaagaatatgaatacgttattactccttgcggcactttccagtcagataacctttaatacgacccagcaaggggatgtgtataccattattcctgaagtcactcttactcaatcttgtctgtgcagagtacaaatattgtccctgcgcgaaggcagtagtgggcaaagtcagacgaagcaagaaaagacccttagtttgcctgctaatcaacccattgctttgacgaagttgagtttaaatatttccccggacgatcgggtgaaaatagttgttactgtttctgatggacagagtcttcatttaagtcaacaatggccgccctctagtgaaaagtcttaatttgttgaaatatcgagcataagatgaatctggagagaatggtctgctgcgaatcagccaacctgaaagtatggataacacaaccctcaaggatgactaatcattgaggaaatagaataaatgttcagaccttttttaaactctcttatgctcggcagtttgttttttccttttattgccattgctggaagcaccgtgcaagggggcgtgatccatttttatggccaaattgtggaaccggcatgtgacgtcagcacccagagtagtcccgtagaaatgaactgcccacagaatggttctattccgggcaaaacctactccagcaaagcgttaatgagcggcaatgtcaaaaacgcgcaaatagccagtgtaaaagtgcagtatcttgataaacagaaaaagctggctgtaatgaacatcgaatataactaagtttctgaacaactcacgttgctgagcagaaaaatgcgatttaaccaaaaagcctgctgtacacttaagaaacaagaaggtgtaaggaggcgttatgaaaacgcgtattcatgttgtgcagggtgatattaccaaactggccgttgatgtgattgtgaatgcggctaatccgagtttaatgggaggcggcggcgtcgatggggccattcatcgcgcagcgggtccggccctgctggatgcttgtttaaaagtcaggcaacagcagggcgattgccctacggggcatgccgttattacgcttgcaggcgatcttcccgctaaagccgtagtgcacaccgtcgggccagtctggcgtggtggtgaacaaaacgaagaccagcttttgcaggatgcctatctcaatagcctacgactggtggcggcaaacagctatacgagtgtggcttttcctgcaatcagtactggggtttatggttaccctcgtgcggcagcggctgaaatcgcagtaaaaaccgttagtgaatttattacccgtcacgctttacccgaacaggtatactttgtctgttatgatgaagaaaacgcccacctctacgaaagactccttacccaacaaggagatgaatgatttgccccggctggcgagcgcggtgctgccactgtgtagccaacatcccggtcagtgtggcctttttcctctggagaaaagtctggatgcgtttgccgcccggtatcgtctggccgaaatggcagagcatacgctcgatgttcagtattacatctggcaggacgatatgagcggtcggttactgttttccgccctgttagccgcagcaaagcgtggcgttcgcgtccgtttgttgctggacgacaacaatacgcccggacttgacgacattttacgcttgcttgacagtcatccacgcattgaagtccggctttttaatcctttcagctttcgcttgctgcgtccgcttggttatatcaccgacttttcccgtcttaatcgccgtatgcacaataaaagtttcactgtcgatggcgtggtgaccctggtgggaggacgaaatattggtgatgcctattttggagcaggggaggagccactttttagcgatttagatgtcatggcaataggacccgtggtagaggacgttgccgatgatttcgcccgctactggtattgcaaaagcgttagtcccttacagcaggtgctggatgtcccggagggtgaaatggcggatcgcatcgagttacccgcctcctggcataacgatgccatgacgcatcgttatttacgcaaaatggaatccagtccatttataaatcatctggttgatggaacattgccgcttatctgggcgaagacacgtttattaagtgatgatccggcgaaaggggagggcaaggcaaaacggcatagtctgttaccgcagcgcctgttcgatatcatgggcagtcccagtgaacgcatcgatattatctcttcctattttgtaccgacacgcgcaggtgtggcgcaactcttacggatggtgagaaaaggggtaaagattgcgatcctaaccaattctcttgccgctaacgatgttgctgtcgtccatgccggatacgcgcgctggcgcaaaaaattgctccgctatggcgtggaattatatgaactcaagccgacgcgtgaacaaagtagtacgttacacgatcgcggcataaccggtaattccggagccagcctgcatgctaaaacctttagcatcgatggtaaaacggtgtttatcggctctttcaatttcgatccgcgtagtacattgctcaatactgaaatgggcttcgtgatagagagcgaaacgctggcacagttaattgataaacgctttattcagagccagtatgatgcggcctggcagctccgtctggacaggtggggacggatcaactgggttgatcgtcatgcaaagaaagagattattctcaaaaaagaacccgccaccagtttctggaagcgggttatggtcagactggcgagcatattgcccgtggaatggttattgtaaatgtggcttaacgggctggtgctttatcgttctcacgcttaacaaccggtttaccagagaacaaaaacttcagtaacgggatgcgcaaatgaatttcatacagaattatcgcaatccctactacaaatatcaggccacagagaaaaccaagccagttggaggtgatgtgcggtgtaatgtatgcgccgaaaaacagcgttaacgggtggtgaaccagatagataaacaggcttgcgttaacaaaataagtcacccgcgcactctggaagttaagcaaacggtggccaaaggagaagaccacattcaccatccacagaccgaggaccatggtgatcacgctctcggtttcgtacatccaggcatcgccactgccatagcgctggttgagtaaataagcgacaaacgccaatgctgctgcaagggtacagccacgagacggcgtggtaaacaaggctttaagatgagggaaaatgaaagccagtgcgccgaggataaagaacggcaaataaaacagcgtttgcatgacaataaaattgaacatgccattactcagaatgggcggatacacaataaaaatcgttcttcttattaccgcataaccgatgccgaggcataaaaaaatcacgcttagttttaccatgctgaattttttattcgttttatcagaattttctaaattatttctgatgcgcttaaatatccatacgcacagcgtcgtcatgaccactaacaccagtaaaaaccacaggtgacttattaattcccaggccaacgtattatatttgtcatacaaactcagcccaggccaactttccgcttttcctttgacatattgcagcataataaattgcggtaatgtcagtagggggatggctgttaacatcgggatacctacacgttcgacacgtactttccaccattttttcaagggatagcgtaaaaaaagcatgtaggaaaagtagccggatataacgaaaaatacctgcatgcggaagctgtggatgaagtcattaaaaagggtcagccacaaactactttcggcgctattcacatgccatgtatggctgctatagattaaagaaatatgaaaaggtatccctaacaacatcagccaggcgcggatggagtcgaggaaatattcacgttgcgcgggtactgggttcatatatggttaactaatctcggatttttcgtcttatccctgtcgggttatgcctttaggcttgttgccatagtgacaccgacctgaccgcgccaggcgcaggcttcaaggtttttatgcatagcatcatcgctaccactaaccagaatggaagcgtctgtaagacggttgataaataaatttgctggcaaaccctacacgaagtcgatgcttctgtctttaggagaagcacggaaagtgaaaacggttgcaatcaggtgcttaatccatgagccagcgtgctgaacgataccgggattctgttgtcggaatggctggttatccattaaaatagatcggatcgatataagcacacaaagggggaagtgcttactaattatgaaacataaactacaaatgatgaaaatgcgttggttgagtgctgcagtaatgttaaccctgtatacatctagtagctgggctttcagtattgatgatgtcgcaaagcaagctcaatctttagccgggaaaggctacgagacgcccaaaagcaacttgccctccgttttccgcgatatgaaatacgcggactatcagcagatccagtttaatcatgacaaagcgtactggaacaatctgaagaccccattcaaactcgagttctaccatcagggtatgtacttcgataccccggtcaaaataaatgaagtgactgccaccgcagtcaaacgaatcaaatacagcccggattatttcactttcggcgatgttcagcatgacaaagatacggtaaaagaccttggctttgccggttttaaagtgctttacccgatcaacagcaaagataaaaacgatgaaatcgtcagcatgctcggggccagctatttccgcgtgattggtgcaggtcaggtttatggcctttctgcccgcggcctggcaattgataccgccttgccaagcggtgaagaatttccgcgcttcaaagagttctggatcgagcgtccaaaaccgactgataaacgtttaaccatctatgcattgcttgacagcccgcgtgcgacaggtgcttacaaattcgtggttatgccagggcgtgacacggttgtggatgtgcagagcaaaatctatctgcgcgataaagtcggcaaactgggggttgcaccgttaaccagtatgttcctgtttgggccgaaccaaccgagccctgcaaataactatcgtccggagttgcacgactctaacggtctctctatccatgccggtaatggcgaatggatctggcgtccgttgaataacccgaaacatttagcggtcagcagcttctccatggaaaacccgcaaggctttggtctgttgcagcgcggtcgtgatttctcccgctttgaagatctcgatgatcgttacgatctccgtccaagcgcatgggtgactccgaaaggggagtggggtaaaggcagcgttgagctggtggaaattccaaccaacgatgaaaccaacgataacatcgtcgcttactggacgccggatcagctgccggagccgggtaaagagatgaactttaaatacaccatcaccttcagccgtgatgaagacaaactgcatgcgccagataacgcatgggtgcaacaaacgcgtcgtagtacgggggatgtgaagcagagcaacctgattcgccagcctgacggtactatcgcctttgtggtcgattttaccggcgcagagatgaaaaaactgccagaggataccccggtcacagcgcaaaccagcattggtgataatggtgagatagttgaaagcacggtgcgctataacccggttaccaaaggctggcgtctggtgatgcgtgtgaaagtgaaagatgccaagaaaaccactgaaatgcgtgctgcgctggtgaatgccgatcagacgttgagtgaaacctggagctaccagttacctgccaatgaataagacaactgagtacattgccgaagactgatatccgcgccgttcatcaggcgctggatgccgaacaccgcacctgggcgcgggaggatgattccccgcaaggctcggtaaaggcgcgtctggaacaagcctggccagattcacttgctgatggacagttaattaaagacgacgaagggcgcgatcagctgaaggcgatgccagaagcaaaacgctcctcgatgtttcccgacccgtggcgtaccaacccggtaggccgtttctgggatcgcctgcgtggacgcgatgtcacgccgcgctatctggctcgtttgaccaaagaagagcaggagagcgagcaaaagtggcgtaccgtcggtaccatccgccgttacattctgttgatcctgacgctcgcgcaaactgtcgtcgcgacctggtatatgaagaccattcttccttatcagggttgggcgctgattaatcctatggatatggttggtcaggatttgtgggtttcctttatgcagcttctgccttatatgctgcaaaccggtatcctgatcctctttgcggtactgttctgttgggtgtccgccggattctggacggcgttaatgggcttcctgcaactgcttattggtcgcgataaatacagtatatctgcgtcaacagttggcgatgaaccattaaacccggagcatcgcacggcgttgatcatgcctatctgtaacgaagacgtgaaccgtgtttttgctggcctgcgtgcaacgtgggaatcagtaaaagccaccgggaatgccaaacactttgatgtctacattcttagtgacagttataacccggatatctgcgtcgcagagcaaaaagcctggatggagcttatcgctgaagtcggtggcgaaggtcagattttctatcgccgccgccgtcgccgcgtgaagcgtaaaagcggtaatatcgatgacttctgccgtcgctggggcagccagtacagctacatggtggtgctggatgctgactcggtaatgaccggtgattgtttgtgcgggctggtgcgcctgatggaagccaacccgaacgccgggatcattcagtcgtcgccgaaagcgtccggtatggatacgctgtatgcgcgctgtcagcagttcgcgacccgcgtgtatgggccactgtttacagccggtttgcacttctggcaacttggcgagtcgcactactggggacataacgcgattatccgcgtgaaaccgtttatcgagcactgcgcactggctccgctgccgggcgaaggttcctttgccggttcaatcctgtcacatgacttcgtggaagcggcgttgatgcgccgtgcaggttggggggtctggattgcttacgatctcccgggttcttatgaagaattgccgcctaacttgcttgatgagctaaaacgtgaccgccgatggtgccacggtaacctgatgaacttccgtctgttcctggtgaagggtatgcacccggttcaccgtgcggtgttcctgacgggcgtgatgtcttatctctccgctccgctgtggtttatgttcctcgcgctctctactgcattgcaggtagtgcatgcgttgaccgaaccgcaatacttcctgcaaccacggcagttgttcccagtgtggccgcagtggcgtcctgagctggcgattgcactttttgcttcgaccatggtgctgttgttcctgccgaagttattgagcattttgcttatctggtgcaaaggaacgaaagaatacggcggcttctggcgcgttacattatcgttgctgctggaagtgcttttttccgtgctgctggctccggtacgcatgctgttccatacggtcttcgttgtcagcgcgttccttggctgggaagtggtgtggaattcaccgcagcgtgatgatgactccacttcctggggtgaagcgttcaaacgccacggctcacagctgctgttagggttagtgtgggctgttgggatggcgtggctggatctgcgtttcctgttctggctggcaccgattgtcttctcgttgatcctgtcaccgtttgtttcggtgatttccagccgtgccaccgttggtctgcgcaccaaacgctggaaactgttcctgatcccggaagagtattcgccgccgcaggtgctggttgataccgatcggttccttgagatgaatcgtcaacgctcccttgatgatggctttatgcacgcagtgtttaacccgtcatttaacgctctggcaaccgcaatggcgaccgcgcgtcaccgcgccagtaaggtgctggaaatcgcccgtgaccgccacgttgaacaggcgctgaacgagacgccagagaagctgaatcgcgatcgtcgcctggtgctgctaagcgatccggtgacgatggcccgtctgcatttccgtgtctggaattccccggagagatattcttcatgggtgagttattacgaagggataaagctcaatccactggcattgcgtaaaccggatgcggcttcgcaataaaaacgtagttgcctgatgcgctacgcttatcaggcctacatcgttcctgcaatttattgattttgcaagactttgtgggtcggataaggcgttcacgccgcatccggcaaaaacaacgagccaataaaaataccggcgttatgccggtatttttttacgaaagaggtatcaaatgcgtttaattgtggtgagcatcatggtgaccttgctgagtggctgtggcagcattattagtcgcactataccggggcaggggcatggcaaccaatattatcccggtgtgcaatgggatgtgcgtgactccgcctggcgttatgtcacgatccttgatctgccattctctctggtttttgatactttactgctgccgatcgacattcatcatggcccgtatgagtgattaacgttcatcccactcatcagctgctgcgcgtccttcctcggtatccagcggtggctcaagctgaaattccccctcgtcccattcatgtaatgtattctcttcctgccactcctggcgtatctctatctcatcatagtcgccatcaaaaacactttgcgcggcttcaccgctaagcataggtaaacattcaccttcttccccttcgtcggcaaaaaactcaacttgccacatgatgtcgccgtcctgcaaaacgtatttttgggcattgaactgttgcacattcgcatcttcggcgtcgatgccggggttgtctgcaagaaattcttcgcgtgcagcgtcaatggcttcttcaagcgttgcgtacatggtcatcacgattctccctttgagttgatgaggtttcagggaaaaggatagctgattctccgcttttgcaagtatgaaaggcgaaaaatcagttgcttacctggggtattcgacgacgacgtagactgttccaactatagactgcgttgaataacactacgccagcggtgacgagaaataccgctctgaaaccgtagttcgcactaatcgctgctcccatcaatggtccggtaacgttgccaatatcacgaaagctttggttatagctgaagatacgcccggcgatctggttgctgctgttgtaaaccaacagtgtctgtacggcggggagtagtgcaccatcggcggcaccgagcaaaaaacgtaaaatcccaagttgcaatggcgtctgaacgtaagacattgggatcaacagcagtacagaaaagatcagcgctgtaatcaggatcttttcgggtccgattcgatcgccaagtttgccgagtcgtggtgcacttagcagagccgccacgcctggcacgctggcgatcatgccactgataaaggcgacgttactgacgttacccgccagttcgcggacatacagcgtcagaatgggggcaatactgcccgtcgccacctggatgattaacgtagtgacaaacaggctgagtaccagtttcgggtttttaagacttgtcaccacttcccgcatgtgcagcatctcttttttgctgaccggctggaatttttctctgatgcaaaacagggtgacgaaaaagcagagtatgagcacactggcggtaataaagaataccggacgtaagccgtagctatcggcgagcaggccgccagccattgggccgagcaacgcaccactaacgccgcctgtggagagcgtacccagcgcccagccgcttttattacgcggtacttgtgtggcgataagagcattagcgttggggacaaatccgccaagtaacccaagaagcgcccgcaggatcaaaaactgccagatattttgtgccagccccatcaacaccatcacgatgcccatgccgagggcagagcgtaatagcatgagttttcggcctttacggtcggcgagtccaccccaaaacggactggcgatggcgctaaataaaaatgtaatgctgaagacaataccggaccacatattcagggcggagtgaccggtaacgccaagctgctcaacgtagaggggtaagaagggcattaccagactgaaggcggcaccggtaagaaaacagcctagccaggcgacgatcaggtttcgtttccagtttataggggtgtcattttcacagggactcatagcaatccgctgttggtgcgccaggcgcggtgaacataagaagaaaagataagcacactaattatgcgcccgacttccagggggcgcaatccagagagcttttatcgctaaatcagggggatttgctgtggtaatgccggatgccattctgaagcatccggcatgggagatttaatagcgactaggaacgccttccgggcgtgttttaaagcgacggtgtaaccacatatactgctctggtgccatcatgatgcatttttcgaccactttgttcatccacgcggcggtagtttcggcatcatccagtggcggagaacactctggcggcagcataatcaattgataccctttgccatctggcttacggcgtggaacgaagggcaccagacatgcgccggacatccgtgccagcatccaggttccggtcgtggtcgcagcctgctcaacggcaaacaacgggacgaaaacgctactgcgcgggccgtaatcatgatccggtgcgtaccagaccacttcgccttttttcagggctttaatcatgccttttaaatctttgcggtcgagcatgcttttattactgcgcaaacggccccaggtttgtagccagtcaatcagtggattatcgttcgggcgataaacgccaatacccggttcctgcataccaaactgccgcgcacccagctccagtgtcagaaaatggatgccaactaacaggatgccgcgtttttgcgcctgcacgtcacgaatgtgttccatgccgatcacttccgtccagcgggcgattcggcggtccggccagaaccacgccatgccggtttccatcaggcccatgccaacggattcgaaattcttcaccaccattttacggcgttcttgttcgctcatttccgggaagcacagttccaggttgcgatgcacaatttttgcgcgtcgtttcataaaacgtaacgccagttttcctaatccacaaccgaggcggtagataaccgggtagggcaattgcacgactaaccaaagtacgccaatacccaaccaggttaaccaataacgcggatgaagcagtgcggtggagaacttgggtagattcgtcatatcaatcctgtttttcaacctattcgggcaattgtatgtattgtcgcattttttcgcccgcaaccaaaatttgtggctgaagactgggcgaaattgccgcgcttgtaaataacaaataatttttaatgcgcaaatgtagcgtaaaatgtgtggatgttaattatcgataattgctatatcatgccgcggatttttactttcccatctcgcaggaaccgtacaccatgccagtgttacacaaccgcatttccaacgacgcgctaaaagccaaaatgttggctgagagcgaaccgcgaaccaccattagcttttacaagtatttccacatcgccgatcctaaggcgacccgtgacgctttatatcagctgtttaccgcgctgaatgtttttgggcgagtgtatctggcgcatgagggcattaacgcgcaaatcagcgtacctgcgagcaatgttgaaacatttcgcgcgcagctctatgccttcgacccggctttagagggtttacgcctgaatatcgcgttggatgatgacgggaaatccttctgggtactgcgcatgaaggtacgcgatcgcattgttgccgacggtattgacgatcctcactttgatgccagcaatgttggtgagtatctgcaagcggcggaagtgaacgccatgcttgacgatcccgatgcactatttatcgacatgcgtaaccactatgagtatgaagtggggcactttgaaaacgcgctcgaaattccggcagataccttccgtgagcagctgccaaaagcagtcgagatgatgcaggcacataaagataaaaaaatcgtcatgtactgcaccggcggcattcgttgtgaaaaggccagtgcctggatgaaacataacggattcaacaaagtctggcatatcgagggcggaattattgaatacgcccgtaaggcgcgcgagcagggcttgccggtgcgttttattggcaaaaattttgtttttgacgagcggatgggcgaacgtataagcgatgagattatcgcgcattgccaccagtgcggcgcgccgtgcgacagccataccaactgtaaaaatgatggctgccacctgctgtttattcagtgtccagtatgcgcggaaaaatacaaaggttgttgtagtgagatttgctgcgaagaaagcgcgttaccgccagaagaacagcgacgccgtcgggcaggacgtgaaaatggcaataagatctttaataagtctcgtggacgtctgaatacaacactgtgcattcctgatccaacagaataaatatcattgccggatgcgtgccatccggcaacatttcacgcttacttctgctgtacgccttccacactaataatcagatccacttcctgagaagctggacctaaatctgtcttgatattgaagtccttgagcttaattttgccttcggcctcgaagcctgcacgtttaccaccccatgggtcgtcgccctgaccaattaatttcgcttccagcgtgacgggtttggttacgccattcagcgtcagatcgccggtaatatccagttcgtcaccgtctttcttcacgctggtggaggtgaatgttgcctgtggatattttgcggtattgaggaaatctgcactgcgaagatgtttatcgcgttcggcgtgattagtatcgacgctggtggtgttaattgtcacattcactttatcggcagccggatttttttcgtcaaaggtaaaagtaccgtcgaaatctttaaaggtgccgtataaccagctatagccaaggtgctggatgcggaaattaacaaaggcgtgctgaccttctttgtcaattttgtaatcggcggcaaccgcactaccggcagagaacatcagggacgcgaaggttaaaccaagcaggctttttttcattttttatactccatagtcagaactgctctttcccagcatgcgcttcagagtgtcgtctttatcgatgaaatgatgcttcagggccataaatccgtgcataacggacagtactacgacgctccacgcgagccaaaaatgcagggcaccggcaaagtctgcctgtgcgccagcgtcggcaagggtcgcggggacgtcaaaccagccaaaaacgctgatcggtttaccatcggcagtactgatcagatagccgctgatgccgatggcgaaaagcaataggtacaatgcgagatgtccagctcttgcggcaagacgagtcatggggctataactcggcagcggacccggcggtggagatatgacacgccacagaacgcgaataaccagccccatcattaacaaaataccgatgcttttatgcagttcgggtgctttgtgataccagccatcgtaataactgagcgtgaccatccacagacctaaagcaaacatgccgtagacaataattgcgcttagccaatggaaggccgcagatataacaccatagcgttcaggggtatttgtgaaactcataagtgcatccaaaacgaatttgcgagagaaagaaaatggcgtgtcggagaatgaattgcaacacaaaaataacaaattgaatgatatttatttttatttcaataattttgaattaataatgaaagaatcttcataagtttagtgggttcagcatcagagatgtctggtgagtgctgtagaagcaggaataatctcattcaatttttcacgctaaatgaaagggagattaaatatttgtcagtttatgtcagtgcggaaaattaaaaataaaacacatagatcagatccataattgccaacaatccccagagaaaaagataaagcatcagatgctcgcgaatattattgatgagatagtgcaacagccgacgcattaaatactcctgtaaaaacggcctcattctggaggccgtaatgatgattattggaagcgggaaagcctgaatggcgtcaaatcaaaatcgctttttttgtcttgcgcaaaatcggcagctatttcccctaaaacactcgcaaatttaaaaccgtgcccactcaggccggtaatgagcagtgtattatcgtggccgggtagggtatcgataataaaatcttcgtcagggctattatcataggtgcaggcagcgccgtacaggcagcaaccgatacccggcaatacattgcgcaagaacgggaaggcttcactcccatcactggccacttccgcaaacggaacacgttcatccgcactatggataacctggcctccgttatgtttgccaatcttcaacgcgtcgttttctgccggaaaaccataatattgatcgccattgggcagttcaccggtaaacgccgggaatttattcttcacgctatagcggccatcggcctgataccaggcaaatactttgcgtacgggctggacaggcagctccgggagcaggtcttttacccatgttcccgcgcagacaatcgcttttttcgcctgatactcaccgtcagccgtttcaatagttacgccatcatcgtcatgacgaattgcggtgaccgggcagttgaacagttgcgcacagcccgcttccttcgccagttggatccaggttttaatcgccagttcgctgcgcaaaaaaccggaatcagtttcaaataagccgatgtagttgtccgggacgcgtatttccggccagcgggccataatcccttgcgcatcgagcttttcaacgttgagttgccattgttcggcgctgtgggcgacgttggcgagaaatgtggaatcagccgggccaaggttaatgacgccagagcgtacaaaaatgggatcttcttcgttgtggcgggagagttcatcccacagcgtttgcgcgcggaggaccagcgggacatacttttcgccttcaccataagcatggcgaattaatcgcgtatcgccgtggtggctgccgtgttgatgcggtggcatatgggcgtcggtcattagcacgtttaaaccggcgcgggttgcataatacccggcggcagcgcctacggaaccgctgccaataatgatgagatcgtatttcatttttttctctctgctctcatggtttaagcagagtaattaactgaatgcagatatacaacccagaaatggtaaaggcaccggtgaggtgccttttgggtggatggtcatgtcatgttaatgacgccgatactcgtttacctggaaatcaccggattcaattttggcgattcctgcttctaatatgctaataaattgtctggcaacatcagtggttaaccagagcgtctgaccaacttcagtcccttcctgctcggacttatttggggtctggtagtgcaaacgcaacatcagcgcatcatagctatcaacggtgctgatgtcccaccctacgagcggatgagtctgaatgacttcattatttttttccatcatggccccctaattcgtgttactagacaacgttattcgaggttcaatgcgtttttatctgaagcaacttcagtataccaataagtaagggtattcaccgaatttttaaagggggaaacagataaatttctgcttttaagatttatatgaacaataaaacagcatgtcattcatatttttttagcatattgtgcaattattttgaggaagtgtagaaattttgtactcaaaattcgtaagtaaaataaaaaagccggggcgacccggcaaaaaaaatcactgcatattattcgctgacaaaccagtcatcggcgctttcccacgtttcctggagaatttcactaatgcgctgtttatcttcttttgtcgcgccaataacgcttaaattattcgctgcggcataacgtacgcttacgtggccttcattatcaggaaacgcatactgaatacggcgggaaagttcgccagccagggcgtcaatagccccagctggcaatggagaagttttcgctatggtgacttcaattcgcataatagccccctgttgaatatactggttatttatacaggtaaaataacctaatgacaacaggaagctacgatttttattgtttaacggaccagcgtaccgtttccccggcgaggaatggcaccagcgtgtcatcagtcagtgcgatgctttcagcaacctgttgctcttcacgtaccagttcgatgaatgtgtcgttgaccggcaacccatagaactgcgggccgtttacagaacagaatgcttcaaagtgctgcaaagcattcatttcttcaaagacggtagcgtaactgcccagcgcggttggggcgttgaagcagcccgcgcagccgcaactgctctctttgcgatgacgtgcatgtggcgcagaatccgtaccgaggaatactcgattaaaaccgctggcgaccagttcacgcaatgcctgttggtgaatattacgtttgaggatgggtagacaatacaggtgcggacgcacgcctccaaccagcatatggttgcggttaaacatcagatgctgcggagtgatggtggcagccagccgttcatttccgtcacggacatagtcggcagcatctttggtggtgatgtgctcaaaaacgactttcagcgcagtcaggcgctggcgcagaggttccatcacgctttctataaagcgcgcttcacgatcaaaaatgtcgatatctgcatgtgtcacttcaccatgcaccagtagcggcataccgattttttccatgcgctcaagtaccggcatgattgcgtcaatactcgtcacgccgtggctggagttagtggttgcgtttgccgggtaaagttttgcagcggtgaacacgccttcgttaaatccgcgctccagctcattaggatccaggctatctgttaaataacaggtcatcaatggggtgaaatcgtgcccggcaggtacggcgtcaagaatacgctggcgatacgccacggcagcctcaacggtggtcacgggcggagccagattgggcattacgatagcccgtccataaatttcgctggtatatggcacgacagtttttaacatgtcgccatcgcggaggtgaaggtgccagtcgtctgggcggcggatctttaatacctgggatggtgcagtcattaatctctatgctccggctgaagggatgtttttgccggacacaaaggataagcggaaacgttttcctttgcacgaaaaataaagggcgcgaatgcgccctcgtgattaatcagtaaatggaatgacaatttcgcctggcttcacttcaatgcctttcgccagttttttcgccattgcttcgccctggctgccatcttcgcgcaggacgtaagcaggttgctggttaaagtaattgcgtaatgcctggttcaaatagggaagcaacgtttgcatcaccgtttgcattttttccggttgtaccgtcgcatcgaccacttccatctctttcaggaagatcgcacctttttctttatcaaacacgggcagcgctttcagcttcagtttcatggtcgctttctgactaccgaacagggagttcatgtccagattggcgtctccggttagggtaaccttattcggctcttcgcgaccaatttggctggtcaggtttgtcagaacaatatgggcgtcagccacgccgggtaaaccgatatctttactgaaattattatgtttcgcaaggctctggttaatttcttgttcggtgatggtgtattgggtgagttgattacagccaacgagcaggccactgacgatcaatgcagcggcaaataaaaacttgttcatggtagtcctcgacatgaaatctgcgtcaatatcctgacacaacgcagcatgtgtcaccagcgataaactcgccagcagaaaaaactgaaaacggcggcaacccgcgaatacaggctgccgcggcgggtcaggattaaatcgccatactacttaacaaattgatttgtgtctgtttcgccatattatcgcggtaatcagcaacgcggcttggccagttaattccggctaccagcgtcagattacgcagtagcgggaatagctgaatatcatcttcgctaagttcgccattcacggcgttcggtttgacgatcagtttgtccagcgcacgtaaatcatcgctgatattcttaatcagaccgtcagagtgggccagcaggtcggcaaaattacccgcgctggcctctttcttgtcgacgaaatatttgcgcgcggcgggagtagaaaactcatcaaatgcgcttttggcaaaacgcggcaacagcagtttgttggcgtagccattgaccttgcgcagccactcttcaatggcaggggaacgtttgccggtcagtaacggtttgccgtcgagtttatcgacatagtgaacgatgtccatgctttctggcatatagcggctgtcatctttttgcagaatgggaacctgtttttgaccgaccatccgggtgggtgtttctgcgtcgtcgttgagcagaacatgtaattcgacggggatatttttcaggccgaaaatcatgcgggctttgaggcagtaagggcagtgatcgtaaatgtatagcttcacgtgactcctccatttggctgtcagttcactttcagtatgaaggagtcaggggggagtatcaaatcaggcgtcgcgttcaagcaaacgacgcgcggcgcgtttctggctaaactgccaacccagcgcaaggaaagtgaagatgccaataatgcccagcatcatccacggaagctctggctggtgcgcgcttttgcccaggtcaaacagccagccgccaccgatataaccaatagcgccgccaatcgccagacccagacggctaaaccccatatagctgccgcgagctcttgcgtccgccaggctagcacttaaggtttcacgcgcaggctcggcaatgatgctcccgatataaaacagacaaatcagggtgaaaagttgttgcaggccgctgaccatgcccaccggcatcatgcttaaactcattatcaacagcccagccatcaaccggtgttccagacgaaaatgcttttcactccagcgggcgatagggtagagcaacgttaagctcagacacgcttcaatggcatacatccatttaacggcagagggcgcgcagccacgtcgttgaccataattggcagcatcagcatcacttgtacagccagcatgtagtaacccgccagcgtcagaacataggtgacaaaacgcttgtcacgcatcacgcgggtcatgccttcgcgaacgggcgtgcgtacggtggagagtttccatgctggtaacaaccacgcattgaacgccgcacatagcacaaatagaactgcccctgtggcgcagaccaggcgaaagtcgtattgcaacagccagctccccaacaatgcgccaatgaccgcaccggcactgtcctgcatcatcaacaggctgaaaaaacgaccacgctgctgtggacggattaatttcaccaccagcgcgctacgcggcggatcaaacaacgtgccaccgagtccgctgagcaggcaactaaaccacaatagccacggttcgtgggcgatacccattgtggcgaatccggcggcgcgcatcagcataccggtaacaatcatcggtttggcaccaaagcggtcggcaattgcaccgccgaaaatacccagaccttgctgaataaattggcgtagaccgagagcaataccgaccatgacggcggcccagcccatttgatcaacgaagcggatagagatcagcgggaagacaacaaagaaccccagcacgaccagcatattatcgatgagcaggaaatatttacccaggttcctcgcctggctcacgcgggacatttcccctcccgggaaataaaagatgagcactttctattctgcattgccgctaagacttttcccatcacttcggggacaatatttttttatcaaaacgtcgctttgatagagagtttttatcaaatatgtgaataatgcagaaaatggcattttggacttttcacagggtctggttgcgcaggtatagtaatacttacagcgtattaaagacgttacgggaaggagtaggtatagaatgtttggctatcgcagtaacgtgccaaaagtgcgcttaaccacagaccgactggtcgtgcgtctggtgcatgatcgtgatgcctggcgtcttgcggattattacgcagagaatcgccatttcctcaagccctgggagccagtgcgcgacgaaagccactgttatccaagtggctggcaggccaggctggggatgattaacgaatttcataaacaaggtagtgctttctactttggcttattcgacccggacgaaaaagagattattggcgttgccaatttttccaatgttgttcgtggctcttttcatgcctgctatctcggttatagcattgggcaaaaatggcagggcaaaggactcatgtttgaagccctgaccgcagccattcgttatatgcagcgcacccaacatattcatcgcattatggctaattatatgccgcacaataaacgcagcggtgatttactggcgcgactgggttttgaaaaagaaggctatgcgaaagactatctgttgattgatggacaatggcgcgatcacgtactgacggcattaactaccccagactggacgcccggccgctaaggagaatctcatgaaatatcaacttactgcccttgaagctcgcgtgattggttgcttgctggaaaagcaggtgaccacgccggagcaatacccgctcagtgtcaatggtgtagtcacggcctgtaatcagaaaacgaaccgtgaaccggtcatgaatctgagtgaatccgaagtgcaggaacagctggataatctggtcaaacgtcattatctacgcacagtgagcggttttggtaatcgggtcaccaaatatgagcaacgtttttgtaatagtgaatttggcgatctgaaactgagcgcagcggaagtggcgttaatcaccacgttgttattgcgtggtgcccagacgccaggtgaactgcgcagccgcgccgcgcgaatgtatgaattcagcgatatggcggaagtggagagcacgctggaacaactggcaaatcgcgaagatggtccttttgtggtgcgtctggcccgcgaaccgggtaaacgcgaaaaccgctacatgcatcttttcagtggtgaggttgaagatcagccggcggtgacggatatgagcaacgcggttgacggtgatttacaggcccgcgtcgaagccctggaaatcgaagtggcagaactgaaacagcgtcttgatagcttgctggcccatctgggagattaaagtgaaaaaattacgtatcggcgtagtgggattaggtggcattgcgcaaaaagcgtggttaccggtgctggcggcagcgtctgactggacgttacaaggagcctggagccctacgcgcgcgaaagccctgccaatttgtgaaagctggcgcattccttatgccgatagcttatccagccttgccgccagttgcgatgcggtttttgtgcattccagcaccgccagccactttgacgtggtcagtacgttactcaatgcgggggtacatgtctgtgtcgataaaccgctggcagaaaatctgcgcgatgctgaacggctggtggaactggcggcgcggaaaaaactgacgttgatggtcggttttaaccgtcgtttcgcaccactctacggtgagttaaaaacgcaactcgccaccgcagccagcctaagaatggataaacatcgtagcaatagcgtcgggccacacgatctttatttcacgttgctggatgattatctgcatgtggtggataccgcgctgtggttgagcggcggcaaagcctctctggatggcggtacgctactgactaacgacgctggcgaaatgctgtttgccgagcaccattttagcgctggtcctttgcagatcaccacctgtatgcatcgccgtgccggaagtcagcgtgaaaccgtgcaggccgtgactgacggtgcgctcatcgacattacggatatgcgcgaatggcgtgaggagcgcgggcagggcgtagtgcataaaccgattcctggttggcagagtacgcttgagcaacgtgggtttgtcggctgtgcgcggcacttcattgaatgtgtgcaaaaccagacagttccgcaaaccgccggcgaacaggccgtgctggcgcaacgtatcgttgacaagatctggcgcgatgcgatgagtgaataaaccctgtaacatctggcggtagcaattcaccataatccaggtagactattcgcctctttcagcgcctgccttgcaggcgttttgcccgtgggtctggattagaacaccgatgaatttattaaaaagcctggccgccgtcagcagcatgaccatgtttagccgtgtgcttggcttcgcacgagacgcaattgtcgccagaatctttggcgcagggatggcaaccgacgcctttttcgtcgcttttaaacttcctaacttgttacgccgtatctttgccgaaggggcattttcccaggcatttgtaccgattctggcggaatataaaagtaagcagggtgaagacgccacgcgggtctttgtctcttatgtttctggcctgctgacacttgcgctggcggttgtgacggtcgctggcatgctcgccgcaccgtgggtgatcatggtgaccgcgccaggcttcgctgacacagctgacaaatttgccctgaccagccagctactaaagattacctttccctatatcttgctgatctccctggcgagcctggtgggagcgattctgaatacgtggaaccgcttcagcattccggcgtttgctccaacactgcttaacatcagcatgattggtttcgcgctgtttgccgcaccgtactttaacccaccggtgctggcgctggcgtgggctgttacggtcggcggcgtcctgcagctggtgtatcagctaccgcacctgaagaagatcggcatgctggtcctgccgcgcattaacttccacgatgccggagcaatgcgcgtggtgaaacagatgggaccggcgatccttggcgtctctgtgagccagatctccttaatcatcaacaccatttttgccagctttcttgcttccggtagcgtgtcttggatgtattacgccgaccgcttaatggagtttccgtccggtgtgctgggcgtggcgcttggcaccattttgctgccgagcctgagcaaaagttttgccagtggcaatcatgatgaatacaaccgtttgatggactgggggttgcgtctttgtttcctgttggcgctgccgagtgcggttgcgttgggcattctttccggtccgttgaccgttagcctgttccagtacggtaaatttaccgcgtttgatgcgctgatgacccagcgggcgttaattgcctacagcgtgggtttgattggcctgattgtagtgaaagtgttggctcctggcttttattcccgccaggacattaaaacgccagtgaaaattgccatcgttacgctgattttaacgcaattgatgaacctggcgtttattggtccgttgaaacatgccgggctgagtctttctattggtctggcggcgtgtctgaatgctagcctgctttactggcagttgcgtaagcagaaaatctttaccccgcaacccggctggatggcgtttctgttgcgtctggtggtggcggtactggtgatgtctggcgtgcttttaggtatgttacatatcatgccggagtggagtttgggtaccatgccctggcgtttactgcgtttaatggcggtcgtgctggcggggattgccgcgtacttcgctgcactggcggtactgggcttcaaagttaaagaatttgcccgccggacggtgtaacaatgcattccggcctgcagtgttcgctttaaaacatatcatgaaactgggtatgttttgtctgcctgctctgggatcgctggggcgggcatttttttgcctattttgcattgttggttagcaaggatgccattcgatgaattttaatatgttgattcaaagatgaaataaaaaagccctggcagttaccagggcttgattactttgagctaattattactcaacaggttgcggacgcgcaggagcggcagaggcatgatgtgttgccgtatgaccacctgcggcacctttaccttcgaaggcaaaagtagggcgctgccagtcactgtgacgcggtgcctccggaacatattccggtgctggagcgcgcgtcattggcgcggtagcgtggttatgctcaacggtgacctcaggttcgaccgcagctaccgtttcaacttctgctgcgacttcagcgactactggcgcggcaggttgagcaacaacttcaggttcagcaactacaacctcagcagtttcgacaacttcttcaatatctgccgtctcttcctgcggttcaaccaccggttctgcttgttctgcaacttcctgggctacggcaacatcagactcggtaatcacctgcggctgttcagttaccgcggcagcgatcacttcaggatgcgtcgtttcaaccacttccggttgcggttcggcaacctgaacgggggcttctacgacaccggccacttcttcaacaactggcgcgctaacaaccggttcgatagcggcggcgacagggacctcagtcaccatcggctgcacatgtacttcttcctgttcgcgctgctcttcaacctgtacatcttgcggacgtacaattggatagcggatccagactttgccagaggccagttccggagacgcgcacgctacggtcaacggcattgggctctgggttggataacgctcgtcacgatagcgacgacgacgctgaccacttacgcgcaggtgacgagggctgcggcgagaacgacgcggcatgccaccgttgtcacggttatcagcattgttctcttcttgctgttctggtgcagtttgcgctacgactggcagcgggactttcaccagttctgtgcgtggagctggcgcttcctgaacaattggttcggcagcgacagtttcttcaaccaccggtgcgactaccgcttcttcggctacgctttgctcgtaacgcactttctgattgagctgacgctgtttacgacgcggctgaaccggacgtacacgttcttcctgttcggtttcctgaacagattgctcttcaacattcagcgccttcgcttcttgttgcgcctgacgtttatcatcattacggcggcggctacgttcacgacgcggcgcttgctgctcgtcggcggtacgcgctttttccgttacctcagcctgctgacggctctcacgcgtctcggcagtctgctgctgtgcctggcgacgattacgacggttttcttcgcgattatcgctgccttcagtacgttcactacgggtgtcgcggcgctcattacggtcacggcggttgttctgacgaggcttgcgacgatcctgttgacgttccggtttcgcttctgctttcggtgctggttgctcggtcggtttggtttcttcaccaccgctgaacagcgctttcagtgcgccgaagaagcggctcaacagcccaggttgtgcaggagctgctggtgttgccggtgcagctttcggtgctggagctacaacaggcgcggcaggttcagctggcgttggcgcaggcggcacatccggcatggcaaaggttgccagcgcaggttgttccggacgcttacgttcagcgaactcttcttcagacggcagcgccatcgcttcttcatgcagcttcggcagcatgtagcttaaggttggggtttcttcccctttacgcacgcgcagcacgtggtagtgcggggtttccatctgatcgtttggcacaattacacagcgcacaccgtcctgacgagtttcaatggcatttaccgcagaacgtttttcattcagcaggtaagaagcgattggcacaggaacaatggcgtgaacttcctgggtgttctctttcagcgcttcttcttcgatcagacgcagaatagagaggctcaggctttcgttgtcacgcacggtgccagtaccagaacaacgcggacaaacgtgatgactggattcacccagacttgggctcaggcgctgacgggacatttccagcaggccaaagcgagaaatatggctgatttgaatacgcgcacggtcctgacgcaccgcttcacgcagacggttttctaccgcacgctggtggcgtactggcgtcatgtcgatgaagtcgataacaatcaggccgccgaggtcacgcaggcgcagctgacgagcaatctcatcggcagcttcgaggttagtgttaaacgcggtttcttcgatatcgccgccgcgggtcgcgcgtgcggagttgatgtcgatggccgttaacgcttcggtgctgtcgataacaatggaaccaccagacggcagacgaacttcacgctggaaggcggactcgatctgactctcgatctggtagtggctgaacagcgggatctcgccggtgtacagtttgattttgctgctgaaatccgggcgacctaatgcagcgatatgctgacgtgccagttcgagcactttcgggttatcgataaggatttcgccgatgtcctgacgtaagtaatcgcggaatgcgcgaacgattacgttgctctcctgatgaatcaggaacggggccgggcggctttcagcggcttttttgatggcttcccagtgtttcagacggaagcttaaatcccattgcagcgcctcagcagatttgccgacgccagcggtgcgcacgataagccccatgccttccggcagttcaaggcttgccagtgcttcttttaattcggtacggtcgtcgccttcgatacggcgagaaatgccacccgcgcgcgggttgttcggcatcagaaccagatagctacccgccagactgataaaggtggttaatgccgcgcctttgttgccgcgctcttctttatcgatctgaacaatgacttcctgaccttcacgcaacacatctttaatgttgggacgaccatgagcactgtagttagcagggaaatattcgcgggcaatttcttttagtgggaggaaaccgtgacgttcagcgccgtaatcaacaaaagcagcttccagactcggttcaatgcgggtgattttacctttgtagatgtttgcctttttctgctcgtgccctggactttcgatatccaggtcatacagacgctgcccatctacaagggcaacgcgcaactcttcctgctgagttgcgttgattaacattcttttcatcgtaacttactcattattcttacattgacgactaagctgcgggcaaagtaacgcctttccgggtgtgaaccgatggcctcgtgtctagtcgcgtcgccaacctcacggttatcgtcagctcaaagaggcgcagagtgtgagttgcccgtttttcatgcggaaaaacagcgcaattatcaaagaaacagactgggtattactctccagaaatatttccatctaccggtaaggactgcaacccgcagcccgctaactgcctgaaagatcaatacgtcttacgccattgctgcgtggatgatcggtcgggcaaaatgggttattccgtaaaatttcttgttttaacaaggatggacacggaaacggcctcattattccactgcaagccttgttatagcaagatgacttttaccatttatcacccgcttactcacagttttttcacttcttgctggtgattggtttaataaccatcaataaagtgatcacgcagtgaagtaataaggtgcaaaagtaaatataagcatagaaaaatgagtggcgcgaatcctgttggctaattagaatcgccaaccatgaaaacagagactccatccgtaaaaattgttgctatcaccgctgacgaagcggggcaacgtatcgataactttttgcgtacccaattgaaaggcgtaccaaaaagtatgatttaccgtattttgcgtaaaggcgaagtgcgggtgaacaaaaaacgtattaagcctgaatataaactcgaagcgggtgatgaggtgcgtattccaccggttcgcgttgctgagcgggaagaagaggcggttagcccacatctgcaaaaggtggcggcgctggcggacgtcatcttatatgaagatgatcacatcctggtgctgaataaaccttccggtacggcggtacatggcggcagtggtttaagcttcggcgttattgaaggtttgcgggcgttgcgcccggaagcgcggttccttgaactggttcatcgtcttgaccgggacaccagtggtgttttgctggtagcgaaaaaacgcagcgcgttgcgttctctgcatgagcaattacgtgaaaaagggatgcaaaaagattacctggcgctggtgcgcggtcagtggcagagccatgtgaagagcgttcaagcaccgttactgaaaaatattctgcaaagcggcgaacgtatcgtgcgtgtgagtcaggaaggcaaaccgagcgaaacacgctttaaagtggaagaacgctatgcatttgccaccctggtgcgttgtagcccggtaacagggcgtactcaccagatccgtgtgcatacacaatatgcgggtcatccgattgcctttgacgatcgctacggtgaccgtgaatttgacaggcagctcactgaagcaggcacgggattaaatcgcctgttcctgcacgctgcagcgttgaagtttactcatccggggaccggtgaggtgatgcgtatcgaagctccgatggatgaaggtttgaagcgttgtttgcaaaagctgcgtaacgcgcgctaatacaagcatataaacctgataatgggcggttggcctgataaggcgtttacgccgcatcaggccgccagcaccgattgccggatgcgacgtaaccacatccggcgcaaaaaattatcccatcagcgggtttttcccttcccgacgtaacatctgacacagcgcgattagcggtaaaccaaccagcgtgttaggatcacgcccctctaaacgctcaaacagcgtaatgccaaatccttcactcttaaagctacccgcgcagtgcaggggatgctctttacgcacgtaattatcaatctccgcctcgctcaggtgacggaaatggacgtcaaaaggctccacttctgtttgcagatgcccattcgcgctattaaacaacgccagtccagtatagaaggtgacgatattgccgctggctttgcgtaattgcagacgggcattttcttccgttaacggtttaccggtgatttcgccatcaagaacacatacctggtcactaccaataattaaatgatccggataacgactcgccagagattgcgctttttcttgtgccagtcgaagcaccaactgtcgcggactttcgtcgctgcgtggggtttcgtcgacctctggtgctgcacattcaaaagagatttgcagtttttccagaagagcgcgacgccatgggctggtggaggctaaaataagtttaggcatatttttttccatcagatatagcgtattgatgatagccattttaaactatgcgcttcgttttgcaggttgatgtttgttatcagcactgaacgaaaataaagcagtaacccgcaatgtgtgcgaattattggcaaaaggcaaccacaggctgcctttttctttgactctatgacgttacaaagttaatatgcgcgccctatgcaaaaggtaaaattacccctgactctcgatccggttcgtacggctcaaaaacgccttgattaccagggtatctatacccctgatcaggttgagcgcgtcgccgaatccgtagtcagtgtggacagtgatgtggaatgctccatgagcttcgctatcgataaccaacgtctcgcagtgttaaacggcgatgcgaaggtgacggtaacgctcgagtgtcagcgttgcgggaagccgtttactcatcaggtctacacaacgtattgttttagtcctgtgcgtagtgacgaacaggctgaagcactgccggaagcgtatgaaccgattgaggttaacgaattcggtgaaatcgatctgcttgcaatggttgaagatgaaatcatcctcgccttgccggtagttccggtgcatgattctgaacactgtgaagtgtccgaagcggacatggtctttggtgaactgcctgaagaagcgcaaaagccaaacccatttgccgtattagccagcttaaagcgtaagtaattggtgctccccgttggatcggggataaaccgtaattgaggagtaaggtccatggccgtacaacagaataaaccaacccgttccaaacgtggcatgcgtcgttcccatgacgcgctgaccgcagtcaccagcctgtctgtagacaaaacttctggtgaaaaacacctgcgtcaccacatcactgccgacggttactaccgcggccgcaaggtcatcgctaagtaatcacgcatctgcgtgatgaagcttagtgaggattttccccaggcaactggggaaagaccaaaccgggcggcgacgataccttgacacgtctaaccctggcgttagatgtcatgggaggggattttggcccttccgtgacagtgcctgcagcattgcaggcactgaattctaatagccaactcactcttcttttagtcggcaattccgacgccatcacgccattacttgctaaagctgactttgaacaacgtagccgtctgcagattattcctgcgcagagtgttatcgccagtgatgcccggcctagccaagctatccgcgccagtcgtgggagtagtatgcgcgtggccctggagctggtgaaagaaggtcgagcgcaagcctgtgtcagtgccggtaataccggggcgctgatggggctggcaaaattattactcaagcccctggaggggattgagcgtccggcgctggtgacggtattaccacatcagcaaaagggcaaaacggtggtccttgacttaggggccaacgtcgattgtgacagcacaatgctggtgcaatttgccattatgggcagtgttctggctgaagaggtggtggaaattcccaatcctcgcgtggcgttgctcaatattggtgaagaagaagtaaagggtctcgacagtattcgggatgccagtgcggtgcttaaaacaatcccttctatcaattatatcggctatcttgaagccaatgagttgttaactggcaagacagatgtgctggtttgtgacggctttacaggaaatgtcacattaaagacgatggaaggtgttgtcaggatgttcctttctctgctgaaatctcagggtgaagggaaaaaacggagctggtggctactgttattaaagcgttggctacaaaagagcctgacgaggcgattcagtcacctcaaccccgaccagtataacggcgcctgtctgttaggattgcgcggcacggtgataaaaagtcatggtgcagccaatcagcgagcttttgcggtcgcgattgaacaggcagtgcaggcggtgcagcgacaagttcctcagcgaattgccgctcgcctggaatctgtatacccagctggttttgagctgctggacggtggcaaaagcggaactctgcggtaacaggacgctgccagcgaactcgcagtttgcaagtgacggtatataaccgaaaagtgactgagcgtacatgtatacgaagattattggtactggcagctatctgcccgaacaagtgcggacaaacgccgatttggaaaaaatggtggacacctctgacgagtggattgtcactcgtaccggtatccgcgaacgccacattgccgcgccaaacgaaaccgttagtaccatgggctttgaagcggcgacacgcgcaattgagatggcgggcattgagaaagaccagattggcctgatcgttgtggcaacgacttctgctacgcacgctttcccgagcgcagcttgtcagattcaaagcatgttgggcattaaaggttgcccggcatttgacgttgcagcagcctgcgcaggtttcacctatgcattaagcgtagccgatcaatacgtgaaatctggggcggtgaagtatgctctggtcgtcggttccgatgtactggcgcgcacctgcgatccaaccgatcgtgggactattattatttttggcgatggcgcgggcgctgcggtgctggctgcctctgaagagccgggaatcatttccacccatctgcatgccgacggtagttatggtgaattgctgacgctgccaaacgccgaccgcgtgaatccagagaatagtattcatctgacgatggcgggcaacgaagtcttcaaggttgcggtaacggaactggcgcacatcgttgatgagacgctggcggcgaataatcttgaccgttctcaactggactggctggttccgcatcaggctaacctgcgtattatcagtgcaacggcgaaaaaactcggtatgtctatggataatgtcgtggtgacgctggatcgccacggtaatacctctgcggcctctgtcccgtgcgcgctggatgaagctgtacgcgacgggcgcattaagccggggcagttggttctgcttgaagcctttggcggtggattcacctggggctccgcgctggttcgtttctaagataaggattaaaacatgacgcaatttgcatttgtgttccctggacagggttctcaaaccgttggaatgctggctgatatggcggcgagctatccaattgtcgaagaaacgtttgctgaagcttctgcggcgctgggctacgacctgtgggcgctgacccagcaggggccagctgaagaactgaataaaacctggcaaactcagcctgcgctgttgactgcatctgttgcgctgtatcgcgtatggcagcagcagggcggtaaagcaccggcaatgatggccggtcacagcctgggggaatactccgcgctggtttgcgctggtgtgattgatttcgctgatgcggtgcgtctggttgagatgcgcggcaagttcatgcaagaagccgtaccggaaggcacgggcgctatggcggcaatcatcggtctggatgatgcgtctattgcgaaagcgtgtgaagaagctgcagaaggtcaggtcgtttctccggtaaactttaactctccgggacaggtggttattgccggtcataaagaagcggttgagcgtgctggcgctgcctgtaaagcggcgggcgcaaaacgcgcgctgccgttaccagtgagcgtaccgtctcactgtgcgctgatgaaaccagcagccgacaaactggcagtagaattagcgaaaatcacctttaacgcaccaacagttcctgttgtgaataacgttgatgtgaaatgcgaaaccaatggtgatgccatccgtgacgcactggtacgtcagttgtataacccggttcagtggacgaagtctgttgagtacatggcagcgcaaggcgtagaacatctctatgaagtcggcccgggcaaagtgcttactggcctgacgaaacgcattgtcgacaccctgaccgccagcgcgctgaacgaacctagtgcgatggcagcggcgctcgagctttaaaagaggaaaatcatgaattttgaaggaaaaatcgcactggtaaccggtgcaagccgcggaattggccgcgcaattgctgaaacgctcgcagcccgtggcgcgaaagttattggcactgcgaccagtgaaaatggcgctcaggcgatcagtgattatttaggtgccaacggcaaaggtctgatgttgaatgtgaccgacccggcatctatcgaatctgttctggaaaaaattcgcgcagaatttggtgaagtggatatcctggtcaataatgccggtatcactcgtgataacctgttaatgcgaatgaaagatgaagagtggaacgatattatcgaaaccaaccttagttctgttttccgtctgagtaaagcggtaatgcgcgctatgatgaaaaagcgtcatggtcgtattatcactatcggttctgtggttggtaccatgggaaatggcggtcaggccaactacgctgcggcgaaagcgggcttgatcggcttcagtaaaagtctggcgcgcgaagttgcgagtcgcggtattactgtaaacgttgttgctccgggctttattgaaacggacatgacacgtgcgctgagcgatgaccagcgtgcgggtatcctggcgcaggttcctgcgggtcgcctcggcggcgcacaggaaatcgccaacgcggttgcattcctggcatccgacgaagcagcttacatcacgggtgaaactttgcatgtgaacggcgggatgtacatggtctgaccgcgatttgcacaaaatgctcatgttgcgcgcagtctgcgtggttatgagtaataattagtgcaaaatgatttgcgttattggggggtaaggcctcaaaataacgtaaaatcgtggtaagacctgccgggatttagttgcaaatttttcaacattttatacactacgaaaaccatcgcgaaagcgagttttgataggaaatttaagagtatgagcactatcgaagaacgcgttaagaaaattatcggcgaacagctgggcgttaagcaggaagaagttaccaacaatgcttctttcgttgaagacctgggcgcggattctcttgacaccgttgagctggtaatggctctggaagaagagtttgatactgagattccggacgaagaagctgagaaaatcaccaccgttcaggctgccattgattacatcaacggccaccaggcgtaagtgaacatctccaggcggtcgttcgaccgcctgagttttatctttttgtcccactagaatcattttttccctccctggaggacaaacgtgtctaagcgtcgtgtagttgtgaccggactgggcatgttgtctcctgtcggcaataccgtagagtctacctggaaagctctgcttgccggtcagagtggcatcagcctaatcgaccatttcgatactagcgcctatgcaacgaaatttgctggcttagtaaaggattttaactgtgaggacattatcagccgcaaagaacagcgcaagatggatgccttcattcaatatggaattgtcgctggcgttcaggccatgcaggattctggccttgaaataacggaagagaacgcaacccgcattggtgccgcaattggctccgggattggcggcctcggactgatcgaagaaaaccacacatctctgatgaacggtggtccacgtaagatcagtccattcttcgttccgagtacgattgtgaacatggtggcaggtcatctgactatcatgtatggcctgcgtggcccgagcatctctatcgcgactgcctgtacttccggcgtgcacaacattggccatgctgcgcgtattatcgcgtatggcgatgctgacgtgatggttgcaggtggcgcagagaaagccagtacgccgctgggcgttggtggttttggcgcggcacgtgcattatctacccgcaatgataacccgcaagcggcgagccgcccgtgggataaagagcgtgatggtttcgtactgggcgatggtgccggtatgctggtacttgaagagtacgaacacgcgaaaaaacgcggtgcgaaaatttacgctgaactcgtcggctttggtatgagcagcgatgcttatcatatgacgagtccgccagaaaatggcgcaggcgcagctctggcgatggcaaatgctctgcgtgatgcaggcattgaagcgagtcagattggctacgttaacgcgcacggtacttctacgccggctggcgataaagctgaagcgcaggcggtgaaaaccatcttcggtgaagctgcaagccgtgtgttggtaagctccacgaaatctatgaccggtcacctgttaggtgcggcgggtgcagtagaatctatctactccatcctggcgctgcgcgatcaggctgttccgccaaccatcaacctggataacccggatgaaggttgcgatctggatttcgtaccgcacgaagcgcgtcaggttagcggaatggaatacactctgtgtaactccttcggcttcggtggcactaatggttctttgatctttaaaaagatctaagttgtcattttccacccttataaaaggtccgcttgcgggccttttttcttagcttttattccgacttgttccgtagtgaacatgctgccacactaacaattctctgataaggagccggtatgttcttaattaacggtcataagcaggaaagcctggcagtaagcgatcgggcaacgcagtttggtgatggttgttttaccaccgccagagttatcgacggtaaagtcagtttgttaagcgcgcatatccagcgactacaggatgcttgtcagcggttgatgatttcctgtgacttctggcctcagcttgaacaagagatgaaaacgctggcagcagaacagcaaaatggtgtgctgaaagtcgtgatcagtcgcggtagtggcgggcgagggtacagcacattgaacagcggaccggcaacgcggattctctccgttacggcttatcctgcacattacgaccgtttgcgtaacgaggggattacgttggcgctaagcccggtgcggctggggcgcaatcctcatcttgcaggtattaaacatctcaatcgtcttgagcaagtattgattcgctctcatcttgagcagacaaacgctgatgaggcgctggtccttgacagcgaagggtgggttacggaatgctgtgcggctaatttgttctggcggaagggcaacgtagtttatacgccgcgactggatcaggcaggtgttaacggcattatgcgacaattctgtatccgtttgctggcacaatcctcttatcagcttgtcgaagtgcaagcctctctggaagagagcttgcaggcagatgagatggttatttgtaatgcgttaatgccagtgatgcccgtatgtgcctgtggcgatgtctcctttagcagtgcaacgttatatgaatatttagccccactttgtgagcgcccgaattaatcatgaaaaaagtgttattgataatcttgttattgctggtggtactgggtatcgccgctggtgtgggcgtctggaaggttcgccatcttgccgacagcaaattgcttatcaaagaagagacgatatttaccctgaagccagggaccggacgtctggcgctcggtgaacagctttatgccgataagatcatcaatcgtccacgggtttttcaatggctgctgcgtatcgaaccggatctttctcactttaaagccgggacttaccgctttacaccgcagatgaccgtgcgcgagatgctgaaattgctggaaagcggtaaagaagcacagttccctctgcgactggtagaagggatgcgtctgagcgattacctcaagcaattgcgtgaggccccgtatatcaagcatacgctgagcgatgataagtacgccaccgtagcgcaggcacttgaactggaaaacccggagtggattgaaggttggttctggccagacacctggatgtataccgccaataccaccgatgtcgcgttactcaagcgagcgcacaagaaaatggtgaaagcggtcgatagcgcctgggaagggcgtgcggacggtctgccttataaagataaaaaccagttggtgacgatggcaagtattatcgaaaaagaaaccgccgttgccagtgaacgcgataaggttgccagtgtatttatcaaccgtttacgcattggtatgcgcctgcagaccgacccgaccgtgatttacgggatgggagagcgttataatggcaaactttctcgtgcagacctggaaacgccgacagcgtataacacctataccattaccggtctgccgccaggtgcgatagcgacgccgggggcggatagcctgaaggctgctgcgcatccggcaaaaacgccgtatctctattttgtggccgatggtaaaggtggtcacacgtttaataccaatcttgccagtcataacaagtctgtgcaggattatctgaaagtgcttaaggaaaaaaatgcgcagtaagtatatcgtcattgaggggctggaaggcgcaggcaaaactaccgcgcgtaatgtggtggttgagacgctcgagcaactgggtatccgcgacatggttttcactcgggaacctggcggtacgcaacttgccgaaaagttaagaagcctggtgctggatatcaaaagcgtaggcgatgaagtcattaccgataaagccgaagttctgatgttttatgccgcgcgcgttcaactggtagaaacggtcatcaaaccagctctggctaacggcacctgggtgattggcgatcgccacgatctctccactcaggcgtatcagggcggcggacgtggtattgaccaacatatgctggcaacactgcgtgatgctgttctcggggattttcgccccgacttaacgctctatctcgatgttaccccggaagttggcttaaaacgcgcgcgtgcgcgcggcgagctggatcgtattgagcaagaatctttcgatttctttaatcgcacccgcgcccgctatctggaactggcagcacaagataaaagcattcataccattgatgccacccagccgctggaggccgtgatggatgcaatccgcactaccgtgacccactgggtgaaggagttggacgcatgagatggtatccatggttacgacctgatttcgaaaaactggtagccagctatcaggccggaagaggtcaccatgcgctactcattcaggcgttaccgggcatgggcgatgatgctttaatctacgccctgagccgttatttactctgccaacaaccgcagggccacaaaagttgcggtcactgtcgtggatgtcagttgatgcaggctggcacgcatcccgattactacaccctggctcccgaaaaaggaaaaaatacgctgggcgttgatgcggtacgtgaggtcaccgaaaagctgaatgagcacgcacgcttaggtggtgcgaaagtcgtttgggtaaccgatgctgccttactaaccgacgccgcggctaacgcattgctgaaaacgcttgaagagccaccagcagaaacttggtttttcctggctacccgcgagcctgaacgtttactggcaacattacgtagtcgttgtcggttacattaccttgcgccgccgccggaacagtacgccgtgacctggcttagtcgcgaagtgacaatgagtcaggatgcattacttgccgcattgcgcttaagcgccggtagccctggcgcggcactggcgttgtttcagggagataactggcaggctcgtgaaacattgtgtcaggcgttggcatatagcgtgccaagcggcgactggtatagcctgctagcggcccttaatcatgaacaagctccggcgcgtttacactggctggcaacgttgctgatggatgcgctaaaacgccatcatggtgctgcgcaggtgaccaatgttgatgtgccgggcctggtcgccgaactggcaaaccatctttctcccagccgcctgcaggctatactgggggatgtttgccacattcgtgaacagttaatgtctgttacaggcatcaaccgcgagcttctcatcaccgatcttttactgcgtattgagcattacctgcaaccgggcgttgtgctaccggttcctcatctttaagagagacatcatgtttttagtcgacagtcactgccatctcgatggtctggattatgaatctttgcataaggacgtggatgacgttctggcgaaagccgccgcacgcgatgtgaaattttgtctggcagtcgccacaacattaccgggttatttacatatgcgggatctggtaggcgaacgtgacaacgtcgtattttcttgtggcgtgcatccactcaaccagaatgatccctacgatgtagaagatttacgccgtctggcggcagaagagggtgttgtagcgctgggtgaaaccgggctggattattattacacgccggaaactaaagtacgtcagcaagagtccttcatccatcatatccagattggtcgtgaactgaacaagccggttatcgtccatacccgtgacgcccgtgccgatacgctggcaattctgcgcgaagaaaaagtgacggattgcggtggcgtactacactgttttacagaggacagagaaacggcgggtaaattactggatctcggattttacatctccttttccggcattgtgaccttccgtaatgcggagcaactgcgcgatgctgcgcgttatgtccccctggatcggttactggtggaaactgacagtccttaccttgcgccggtaccgcatcgaggaaaagagaatcaacctgcgatggttcgtgacgttgcagaatacatggctgtgttgaaaggtgttgccgttgaagaactggcgcaggtaaccaccgataacttcgcccgtctgtttcacatcgacgcttcccgccttcaatccatccgttgaatgagtttttttaaagctcgtaattaatggctaaaacgagtaaagttcaccgccgaaaattgggcggtgaataaccacgtttgaaatattgtgacatatgttttgtcaaaatgtgcaacttctccaatgatctgaagttgaaacgtgatagccgtcaaacaaattggcactgaattattttactctgtgtaataaataaagggcgcttagatgccctgtacacggcgaggctctccccccttgccacgcgtgagaacgtaaaaaaagcacccatactcaggagcactctcaattatgtttaagaatgcatttgctaacctgcaaaaggtcggtaaaagcctgatgctgccggtatccgtactgcctatcgcaggtattctgctgggcgtcggttccgcgaatttcagctggctgcccgccgttgtaagccatgttatggcagaagcaggcggttccgtctttgcaaacatgccactgatttttgcgatcggtgtcgccctcggctttaccaataacgatggcgtatccgcgctggccgcagttgttgcctatggcatcatggttaaaaccatggccgtggttgcgccactggtactgcatttacctgctgaagaaatcgcctctaaacacctggcggatactggcgtactcggagggattatctccggtgcgatcgcagcgtacatgtttaaccgtttctaccgtattaagctgcctgagtatcttggcttctttgccggtaaacgctttgtgccgatcatttctggcctggctgccatctttactggcgttgtgctgtccttcatttggccgccgattggttctgcaatccagaccttctctcagtgggctgcttaccagaacccggtagttgcgtttggcatttacggtttcatcgaacgttgcctggtaccgtttggtctgcaccacatctggaacgtacctttccagatgcagattggtgaatacaccaacgcagcaggtcaggttttccacggcgacattccgcgttatatggcgggtgacccgactgcgggtaaactgtctggtggcttcctgttcaaaatgtacggtctgccagctgccgcaattgctatctggcactctgctaaaccagaaaaccgcgcgaaagtgggcggtattatgatctccgcggcgctgaccagcttcctgaccggtatcaccgagccgatcgagttctccttcatgttcgttgcgccgatcctgtacatcatccacgcgattctggcaggcctggcattcccaatctgtattcttctggggatgcgtgacggtacgagcttcagccacggtctgatcgacttcatcgttctgtctggtaacagcagcaaactgtggctgttcccgatcgtcggtatcggttatgcgattgtttactacaccatcttccgcgtgctgattaaagcactggatctgaaaacgccgggtcgtgaagacgcgactgaagatgcaaaagcgacaggtaccagcgaaatggcaccggctctggttgctgcatttggtggtaaagaaaacattactaacctcgacgcatgtattacccgtctgcgcgtcagcgttgctgatgtgtctaaagtggatcaggccggcctgaagaaactgggcgcagcgggcgtagtggttgctggttctggtgttcaggcgattttcggtactaaatccgataacctgaaaaccgagatggatgagtacatccgtaaccactaatccgtaagacgttggggagactaaggcagccagatggctgccttttttacaggtgttattcagaattgatacgtgccggtaatgctgaaattacgcggtgtgccgtagacgatagaaccttccacgttggtatcgtaggttttgtcgaacaggttattgacgttcccctgtaagctgaagtttttcgtcacctggtagcgggtgaagagatccaccagcgcgtagctaccttgctcggcgcggaaggtgccatacggcgtcacggtgtcggtatacacgcgattttgccagttaacaccaccgccgaccgtcaactctggcatgacaggcaaccgatagctggtgaacattttaaccgtggtgcgtggcagattaggattaacggcgtttccttcgttatcctctgcaatatagcgcgttgcgccaaatgtcagctgccagttgtcggtaattgcgccgttgagttcaaattccacccctttactgactgtcccatccaccgctttataggcggtttcgccgttgctgccggggataggtgtaccggtggactgagcgacattatcctgctcaatacggaagatggctaacgtggtggtcagacggctattcatccagtcgcttttcagacccagctcgtagttgttaccggtgattggagccagatatttgccactactgtcacgatcattttgcggctggaaaatagaggtatagctggcgtaggtgctccagttgtcattgatgtcaaacaccagaccagcgtaaggcgtggtgtggtttttctccatgctgtaagtcagcgtatcaacccgccagttggtataacgtgcgccgaggatcagatgcagcggatcggcaagggtgacacgagtggcagcatataagcttttcatatgtgtggtatcgtcctgcgccaggctctgtggactccagtcggtttgtgggaaattgccattaaagttgtagaaactgccaatttcatccgggaagatgttggcccaactactgaagtaacgattgttttgtttgctgtaactgccaccaaacattagattgtgctgacgaccaaacaattcataactaccgtcagcgaacaaatccagcgcatcaactttacgtttgccactgttccaaccggtgccgccgacataatcaaagccaggtccataattactgtatggcccaaccagcataccatccgctttgtttacataggcatcgacatacatcattttgctgtcaaattcgacttcagagtgggtggcattcagtgtcgcttgccaggtatcagcaaactgctgcttcagggtcataaagaccttgttgatctctttatcgttgtacgcccagtcaggtgcggtactgcgtgcgcgatcgtaactgttgctgctgccatcagtattccagcgcggtaaaccgccccaggtagggctattaacatcaatgcgctgatattcgtaaccggcactaagcgtcgtaagatcgcctaaatcagcatcgacaatgccgctgaagaaggtcttttcactgttgtagcggtccagccaactgtcgttattctggtagccgccgacaattcgcgcgcggattttaccgtcttcggtgagtgggctttgtaaatccgccacataccgttctttgttccagctaccgtattccgcgctgacatcgcctttaaattcacgactggtcgcgtgttttcgaaccatattaattgccgcagatggattacccgtcccggtcatgagtcctgtcgcgccacgcactacttctacgcgttcaaagagtgccatatcagaaagtgcgtcgcccagattccagcggctttcaaaataggtggggataccatcaaccatatagttatcgatctggaatccgcgggaataataaagagcacgatcggaatccgcctgacttttgctgatccccagcgtgttttccatcacttcgcccagcgtttgtaactgctgatcttccatccgctgctggctaacaatagtgacgctctgaggaatatcacgttgagtcatctgcattttggtacccgcagaggtagacgttacgctgtaatcattttcgccatcatctggagctgtggcactaccctcaacaatcaccgtttcttcagtggctggtgcagcaaaagcggcagaaggtaatagtgccagtgctatgcaaccggcaagtagactcggtttggtgatggcttgatattgattatccctgttaaattgtgtactaagcatttgaaatctcttggtttatgttgtcgtcaggctcatgccggaggagggtgatgagcgattatatttagtgtgcgaataattttgtttgtaaatgcaaatgagaaatatacgcattcatatttgtcatgtaaaccaaacagagaatgtcttttcagcgcattcgcaggcagaaatgggaataatggcgatatatacggcagcaaaacgattttttgcttaagaaatcgtgagttaaggttgaaagagcaggtttaactcgaccatactctatactcgcagtgtggcgcggcgtagcatggcgcaacgcatggctatttgaaaaaggaaaatgtcgtggcagaagaaactatattcagcaaaattattcgtcgtgagatcccctccgatatcgtctaccaggatgatctggtaacggcgtttcgcgatattagcccgcaagcgccaacgcatattctgatcattccgaatatcctcattccgactgtgaacgacgtcagtgctgagcatgagcaggcgctgggacgcatgatcaccgtagcggcaaaaattgctgagcaagaaggtattgccgaagatggctatcgtctgatcatgaataccaaccgccatggcggacaagaggtttaccacatccatatgcacttgttgggtggccgtccgctgggaccaatgctggcgcataaaggtctgtaacgatgagaaaaggatgctttgggctggtgtctctggtgttgttactgctggtgggctgtcgtagtcatccggaaattccggtgaatgatgagcaaagcctggtgatggagagttctttattggctgcgggcatcagtgcagaaaagcccttccttagcacgtctgatattcaacctagtgcatccagtacgctttataacgaaaggcaagaacccgttaccgttcattatcgtttttactggtatgacgccagagggctggagatgcatcctctggaaaggccacgcagcgttaccattcccgcacatagcgcggtaacgctgtacggcagcgccaattttctgggggcgcacaaagtcagactttatctatatttgtaaggggtgaatcttgatgacaaaaatgagtcgctacgccttgattaccgcgctggcgatgtttctcgccgggtgtgtggggcaacgtgaacctgcaccggtagaagaagtgaaaccagcgccggaacaaccagccgagccacaacagcctgtccccacagtgcccagcgtgccgacgatcccgcagcagccaggcccaattgagcacgaagatcaaactgcaccgcctgcgccgcatattcgccattatgactggaatggcacaatgcagccgatggtcagtaagatgcttggggctgacggggtgactgcgggtagcgtcctgctggttgatagcgttaacaaccgtactaacggtagcctgaatgccgcagaagcgaccgaaacgctgcgaaatgcgctggctaataacgggaaatttaccctggtttccgcccagcaactgagcatggcgaagcaacagttaggtttgagcccgcaggacagtttaggcacccgtagtaaagccataggcattgcccgcaatgtcggcgctcattacgtgctgtactccagcgcctctggcaacgttaacgctccgaccctacaaatgcagctgatgctggtgcagacgggcgaaattatctggagtggtaaaggtgccgttagccagcaataagtaaaattatctggtcaggtaaaggtgccgtttcgcagcaataatcccatcacgcgcgacgaattgctgagccgctttttcccgcagtatcatcccgtcacgacgtttaatagtgggcttagtggcgggagttttctcattgaacatcagggccagcgttttgttgtgcgtcagccgcacgatcctgatgcgccgcagtccgcgttcttgcgccagtatcgggctttaagtcaactacccgcatgcattgcaccgaagccgcatttatatctccgtgactggatggtagtcgactatctgcccggcgcggtaaaaacgtatttgccggataccaacgaactggcaggcttgctgtattatctacatcaacaaccacgttttggctggcgaataacgctgttgccgttactggaactgtactggcagcaaagcgatccggcgcggcggacagtgggttggctgcgaatgttaaaacgtctgcgcaaagcgcgggaaccacggcctttacgcttaagtccattgcatatggatgtccacgccggaaatttagtgcatagcgcgagtgggttaaaactcatcgactgggagtatgccggagatggtgatatcgcgctggaactggcggcggtgtgggtggaaaatactgaacagcaccggcaattggtcaatgactatgccactcgcgcgaagatttatccggcgcaattatggcgtcaggtcaggcgatggtttccctggctgctgatgctcaaagcagggtggtttgagtaccgctggcgacaaaccggcgatcaacaatttatcaggctggccgatgacacctggcggcagctattaataaaacaataaggagagcagtgtgggtccagtaatgttggatgtcgaaggttacgaactggacgcggaagagcgtgaaatactggcgcatccgctggtgggagggctgattctctttacgcgtaactatcatgatcctgcccagttacgtgaactggtgcgccagatccgcgcagctagccgcaatcgtctggtggtggcggttgatcaggaaggtggacgcgtgcagcgttttcgtgaaggttttacccgcttgccagcggcgcaaagtttcgctgcgctgagtggaatggaagagggtggcaaactggcgcaggaggcaggttggttgatggccagcgaaatgatcgctatggatattgatatcagctttgcgcctgtgctggatgtcgggcatatcagcgcggcgattggcgagcgttcttatcatgccgatccacaaaaagccctggcaattgccagccggtttattgatggtatgcatgaagccggaatgaaaacgaccgggaaacacttcccaggacacggtgcagtaacggcagacagtcacaaagaaacaccgtgcgatccacgtccacaagcggagattcgcgctaaagatatgagcgtcttcagttccttaatccgcgaaaataaactcgacgccattatgcctgcgcatgtgatctacagtgatgttgatccgcgtccggcgagcggttctccctactggctgaaaaccgttttgcgtcaggaactgggttttgacggcgtgattttctctgacgatttaagcatggaaggtgccgcgattatgggcagttatgccgaacgcgggcaggctagtctggatgcgggttgcgatatgatcctggtctgcaataatcgtaaaggggccgtcagcgtgttagataatctgagtccgatcaaggcagaacgtgttacacgtttgtatcataaaggtagttttagccgacaggaactgatggacagcgctcgctggaaagcgatcagcacccgtctgaatcagttacatgaacgctggcaggaagagaaagcaggtcactaaccctggcttatgtgaggaagcgatgattatctatttacacggttttgactctaacagtccgggtaaccacgagaaagtcttacaattgcagtttattgacccggatgtacgcttgataagctacagtacgcggcatccgaaacatgatatgcagcatctgcttaaagaagtggacaaaatgttgcaactgaacgttgacgagcgtccgctaatttgcggcgttggcttgggcggatactgggcggaacggattggttttctttgcgacatccgccaggtgatcttcaaccctaatttgttcccttatgagaacatggaaggcaagattgatcgcccggaagagtatgccgatattgccactaagtgtgtgaccaacttccgtgagaagaatcgcgatcgttgcctggtgattttgagccgtaatgatgaagcgcttaacagccagcggacatctgaagagttgcatcattattacgagattgtctgggacgaagagcagacgcacaaattcaagaatatctccccgcatttacagcgcattaaagcgttcaaaaccctcgggtaaatgccctcgtcgcatcaggtaaccttgccggtacctgatgcgctccgaattctgtgggtcggataaggcgtccacgccgcatccgacagtcgagcatcaatgcctgatgcgcttcttatcaggcctaccgaacgccctgcatacacccctcactctatatcactctcacaaattcgctcaaataataaacaataaactctgttttttgatctcacccggtaaagtcgcctatcttttcagcaacaaaacttgattaacatcaattttggtatgaccaatgcaccattcatgttattctcaatagcgaagaacattttcattgctgtaacctgttgttaattaagagctatgttaataaccattaattaacaattggttaataaatttaagggggtcacgttgactacgccattgaaaaagattgtgattgtcggcggcggtgctggtgggctggaaatggcaacacagctggggcataagctgggacgcaagaaaaaagccaaaattacgctggtcgatcgtaaccacagccacctgtggaaaccgctgctgcacgaagtggcgactggcagccttgatgaaggcgtcgatgcgttgagctatctggcccatgcgcgcaatcatggtttccagttccagctgggttccgtcattgatattgatcgtgaagcgaaaacaatcactattgcagaactgcgcgacgagaaaggtgaactgctggttccggaacgtaaaatcgcctatgacaccctggtaatggcgctgggtagcacctctaacgatttcaatacgccaggtgtcaaagagaactgcattttcctcgataacccgcaccaggcgcgtcgcttccaccaggagatgctgaatttgttcctgaaatactccgccaacctgggcgcgaatggcaaagtgaacattgcgattgtcggcggcggcgcgacgggtgtagaactctccgctgaattgcacaacgcggtcaagcaactgcacagctacggttacaaaggcctgaccaacgaagccctgaacgtaacgctggtagaagcgggagaacgtattttgcctgcgttaccgccacgtatctctgctgcggcccacaacgagctaacgaaacttggcgttcgcgtgctgacgcaaaccatggtcaccagtgctgatgaaggcggcctgcacactaaagatggcgaatatattgaggctgatctgatggtatgggcagccgggatcaaagcgccagacttcctgaaagatatcggtggtcttgaaactaaccgtatcaaccagctggtggtggaaccgacgctgcaaaccacccgcgatccagacatttacgctattggcgactgcgcgagttgcccgcgtccggaagggggctttgttccgccgcgtgctcaggctgcacaccagatggcgacttgcgcaatgaacaacattctggcgcagatgaacggtaagccgctgaaaaattatcagtataaagatcatggtagcctggtaagcctgagcaacttctccaccgtcggtagcctgatgggtaacctgacgcgcggcagtatgatgattgaaggacgaattgcgcgctttgtatatatcagcctataccgaatgcatcagattgcgctgcatggttactttaaaaccggattaatgatgctggtggggagtattaaccgcgttatccgtccgcgtttgaagttgcattaatcgacgtacactggcggatgtggcataaacgcctcatccgcccttgaggaacagcgcgatcggcagccgcgttgtatcaggcatcctttcagactcctccgaatccttaagtatttccagccattcccgcgcttttcatcttctgtctgatagctgcttttctccttcgcttgcatgattggcataactgcaaagaaggaggtgttcccgtgaataaaagtatgttggcgggtatcgggattggtgtcgcagctgcgctgggcgtagcggcagtggccagtctgaacgtgtttgaacggggcccgcaatacgctcaggttgtttctgcaaccccaatcaaggaaacggttaaaacaccgcgtcaggagtgtcgcaacgtcacagtgacccatcgtcgaccggtgcaggatgaaaatcgcattaccgggagcgtgctcggcgctgttgctggcggcgtgatagggcatcagtttggtggtggtcgcggtaaagatgtcgccactgttgtgggggcgctgggtggtggatatgccggtaaccagatccagggctctctccaggaaagcgatacttacacgactacgcaacagcgttgtaaaacggtgtatgacaagagtgaaaaaatgctcggttatgatgtgacctataagattggcgatcagcagggcaaaatccgcatggaccgcgatccgggtacgcagatcccgctagatagcaacgggcaactgattttgaataacaaagtataacaaggctgtactctgcaatttggcccctcattcgctcaggctgaggggctttttttgcgacttatttcaccagttcgggccataaacgcaaagtcgttccggcaatctgcatcagtttttccaggcttgcaccttcgcgtgcgctgatgctcatcccctgaataatacaattaaggaattctgccagatgtgtcacgtcacagtggggcgggatttccccgcgcgcttgtcgttgacataaaaactgctgcaaagtgcgctcttgcatcgcatggcgacttttcaacgtattggcgatatctccactatctggggagagggtggtgcagttgttgatcatgaagcagcctgccggggtgtctttgctggtaaagcagttggcgatggcagcaaaatagtcagccagcgcagactccacgcttttctcttcacaaaacagctgtgcttcatgcttagcggcaaaacgatcgatatagcggtcgagaacggcacgaaataacccctctttgttggtaaattccgcgtatagcgtgggcgctttggctccggtcgcttcgacgaggtccgcaagagaagtcgcttcataaccgtgttgccagaacaatttcatggccttatcaagcgcggcatccctgtcgaacacttttgggcggccacggcttttttttacacattgtgtactgtcagttgccatgatgccgttgtacctggtgactgtgaatgaaaggttattataaaaataatcacctccgttcaccagtccagatcccataaaaataattgctttctatttaactgaaatttaaagatttttaaattaattaatgattgttataaaaaatatcttgtatgtgatccagatcacatctatcatttagttatcgatcgttaagtaattgcttgcgacgtcattcatctgcataaggccactattatgaaaaacgtaaaaaccctcatcgctgcggcgattttaagctccatgagttttgccagctttgcggctgtcgaagttcagagtacgccagaaggccaacaaaaagtcggtacaatcagtgctaacgcggggacaaatctgggaagcctggaagagcagctggcgcaaaaagcggatgagatgggcgcaaaatctttccgtattacttctgtaaccggtccgaataccctccatggaacagcagtaatttataaataagcattaaccctcattaatgcctgctactgctgattttttccccgcgacatgccgtgtcgcggggatttttttatccgggctttacagcgtttgtgggctcacttgatgacggcggacatccaccggcatcccggaacggacatccatcacatgttgcatcacttcagcgtcagtttgtgctgcatctttaaaactttgcattgcgctattcagcgtaattggcagcagctgcggatcgtcatcaatcttctcactcagcggctgatgtacttcaaccagacgcgcaccgtttggttcggcagagacttttatcggagtgttgatgatattcactttggtgcctggggtgacctggctaaagagtgttttgatatcgtcatcccgcagacgaatacagccagaacttacccgcatgccaatgccgaaatcggcgttcgtaccatgaagcaaataaacgccgccataggccgccagacgaatcgcatgatggcccattgggttatccagtccagccggcactaccgcaggcaactcaattccctgtgctttataacgggcgcggatgtttgccgttggcgtccaggttgggtttgcacgtttgtcactaacggtggtcaccattgtcggtgtcagcgtgtcaccacctaactgaccaatacctattggatacacggttacgctatttttacccggcgggtagtaatagagacgcagctccgcaatgttgatcacaatgccttcgcgcggcgcatctggaagtagggtttgcaacgggatcgttaacacgctgcccgcgcgcggtacgtaaggatcaacgccggggttagcctgtaacagagcgagaaagccgacgttgtattttttggcgatggcttccagagaaccaccgtcattttccaccacatgaaatttgttttcgccaaccagacgactgcccgctggcggcagcggccaggtgttggcttttgccggtagcgccagcgccacggcagcggcgaacgtaaaaaacgttagccagcgagaaaaacgcgttttgatcatcaccaaaaatccataataaatataaggttattgtaataaacagataagcctgaattatggatggtgacagtgtcggatagtgcagggaagtgcaaagaatttgtaaatgttgcagatgggggcgcagaaacgcccccgatttaccattaagcgatcgcgttctcttccagttcacgcataaactggcgtacccattcgatacgcgttttccgctcactcaaatcctgaataaatttcaggcgcgtcggaccatcaaggcggtaatgctgcggctgtttttgcagcaaaccaatcaaccaggccggattaacgtgattcttctcggcaaattcgatcaccccgcctttctcattaccttccagcttcctgatccccagtttctgcgcttgctggcgcagacgggcaatatccagcagggtacgcgccggatctggcagcaggccgaagcgatcgataagctcgactttgatctcttccagttcgttttccgttttggcgctggcaatacgtttgtagaagctcagacgcgtgttcacgtcagggatgaaatcatctggcaataggctcggcatccgcagctcgacttctgtttgctggctggtgagatcttccaggctcggctcgcgtccggctttcagtgcatcgacggcgttttccagcaactccatatacaggctgaaaccgatggtttccatactgccgctttgttcttcgccaagcagttcacccgcgccgcgaatctccagatcgtgcgttgccagcgcaaaacctgccccgagatcttccaggctggcaattgcttcaagacgtttttgtgcatcggtagtcatcgcttttggatgcggtgtcagcaaccatgcatatgcctgatgatggctacgtccgacgcgaccgcgtaactggtgcagctgcgccagaccgaagtgatccgcgcgttcaatgataatagtgttggctgtcgggatgtcgatcccggtttcgataatggttgtacaaaccagcacgttgaaacgttgatgatggaaatcattcatcacccgttccagttcgcgctcgcgcatctgcccgtgaccgatggcgatccgcgcttctggcaccagttctgccagccgttcggcggctttctgaatgttttccacatcattgtagagataataaacctgtcctccgcgcaaaatttcacgcaggatcgcctcccggaccaccatgctgtcatactcacggacaaaggttttaactgccagacgacgggcgggcggcgtggcgataatgctcaggtcacgcattccgctcattgccatattcagcgtacgtgggatcggcgttgcagtaagcgtcagaatatccacgttcgcgcgcatcgctttaatgcgctctttatgacgcaccccgaagcggtgttcttcatcgacaatcagcaggcctaaatctttaaacttgacgtcactttgcagcagtttgtgcgtaccgatcagaatatcgattttcccttccgccacttccgcaaggatttgcgtctgctctttggcgctgcggaaacgggagatcatttcgatacgtaccggccagttggcgaaacggtcgcggaagttgtcgtaatgctgctgcgcgagaagggtggtaggcaccagcaccgccacctgcttgtggttatctactgccaggaaagctgcgcgcatcgccacttctgttttaccaaagccaacatcgccgcacaccagacgatccattgccagcggctgacacatgtcgctaagtaccgcattaatggcctgcgcctgatccggcgtggtttcaaacgggaagctgtcgcagaacaactgatactgctcacgatcgtgtttaaacgcgaagccctctttggcggcgcgttgcgcgtagatatccagcaattccgccgccacatcacgcactttttccgccgctttctgccgcgcgcgactccacgcatcgccgccaagtttatgcagcggggcgttttcttccgcgccacctgcgtaacggctaatcagatgcagactgctcaccggaacatacagtttggcgtcgttggcataggtgagcatcagatactcgccagtaatgccacccgcttccagcgtggtcattccggcataacgaccgacgccgtgctccagatggaccaccggctgaccaatatgcagttccgcaaggttacggatcagtgtatcggggttgatggtgcggcgagaatcctgacgacgacgggcaacgcgttcaccgagcagatcgctttcgcaaatcagcgccagattacgcaccgtatcgacaaaaccatgttcggcagcgccaatcatcagataacgcccacggtcgctggcttcatcaagacgcataatgcgttgcggagcaattttaattcgtgcgagcagttcacccagcgcttcacggcgaccttcactttctacgctgaacaccaccggaccgtcgaaagtctcgaggaacttacgcagcgcatccagcggcgctttttgttgtgcctgaacggccaggtctggcagtttctggaaacctaaattggcattcgcggcttttgtcggtaaatgttcagtttttagctgcacccggggccagtttttcagctcactgaagagctcgtccacccgcagccagaggctttgtggtggcaacagcgggcgcatcggatcgacgccgcgattctcaaaacgcgccagcgtgtcagcctggaaacgttcggcactggtttccagatcgccagtattcacgagcaaggtattggcagggaaataactgaacagcggcggcagtggttcgctgaagaacaatggctgccagtactcgatcccggcaggtaatgtgcctttactcacttgctggtaaatatgttctggatcgcgcttcacttcgaaggtatcgcgccactggctgcggaacagttcaattgccgctttatcggtcggaaattcgtgcgcgggcagcagattgatcgcttctacttcctccagcgtgcgctggctgtcgacgtcaaacacccgcaggctgtcgatttcatcatcaaagaaatcaagacgataaggcagctcactccccatcgggaagagatccagcaacgcgccgcgcgtggcgtattcgccgtgctccatcacctggtcaacatggcgataaccggcgctgtccagttgggttcgtaatgcatctcgactcaggcgctgaccttttttcatcaccagcgcatgaccgtggagaaaactgtgtgggcaaacgcgctgcataagcgtattcaccggaacaatcagtacgccacgctgcatcgtcggtagctggtaaagggtggaaaggcggctggagataatgtcctgatgagggctaaaactgtcgtagggaagagtttcccagtccgccagattcatcaccatttgatcggtaaactggctgatttcatcatgcaaacgcagagcattttgcatatctggtgcaatgagtaccaccggaccggcgtgacgttcggcaatttccgctaccagcgttgcacaggctgcgccggttaactcgcccagcagacgctgctcacccgctttgacgggcagcgtataacgatattgttcaggcataacggttgtcagattctcgttaggatatgcctcaacatatgggggcatatctctgataagcaatgctgttcattatccgtaatcgacatggtttagcaaattgaatcgccccggctggggcgatggcttagcgggagtaactgacggcagcgggcagactaggcggggagaacaacagatcgctgaatgcacgctgactaagttttcttaccagcaagcccgcaacagtacagatgaacaaactgacaaagggataaaccagcaggagtgtcagttcgacttgcgggctccagcgtgctgcgttcatttgcgcaagcagagttaagctgaatatttcaaccagaatgcgatgggtggtgtagatagcaatggtgttggagccaatcacattcagcaggctggtggagcgcataccgaatcgttgctcgtattgataaaacagcttcatgatcaccacaatgcttaccaggctcaacagcaggctgatagtaaacaaccaggcaccgaccgccagaacggtaagcaaagaagccatcagcagatggcggcgcaacggcacctctttaacacaggtcattattgttgcgccaaaccatgcgccaaggctgtaataaggcaaattgcggatcacactgttcattccccaccacggcgtgggaacgaaattaaccgccacactcagcagtacaaacaaggcgaatagtggcagcgccagacggctaaaaattttacataccacgaaatagacaattaacgcatacagataccacaagctggtgctggcggtgatcatcccgtgcaggaactcaccggtggaatcggcataagcggcattggaggcattgcttaaatcgcgctcaggtgccagccactggttcagcgcacttaacgccagccactgcaccacgccccaaagcgccagcacccagaagatgttccagatccgtttatcgagacaatttccccacggtacgctgtcgatatagcggcgaatcaaatagccggatataaagaaaaaaaccggcatacgaaagggggcaaggtaaagattgaaatagatccagcatttgctcaggacttcgcttaacggatgctgaaaagtggtcagatgcggataaaaggtaatgacgctgtgataaatcaccaccagacaaatacataaccctttgatctggttaatccatagctctttttgtttcatcaggacaacacgctcttttttaatttacatgcggttgatcctgcgggttatgacccgaggtgtaatgggtatctgtctgtattggatgatttttcagattaagatcaggcggcaagattgatgataaaacatggcaatttagccgattgatttacgggggcttttcagattagccctgacgatcacttacagttcagacgtttacccatcttgctttcgcttatatactcgtgtctttgctacagcaaccagacggatttcatgtaccaacctgtcgctctatttattggcctgcgttacatgcgtgggcgtgcagcggatcgcttcggtcgtttcgtctcctggctttctaccatcggcattaccctcggggtgatggcgctggtcacagtattgagtgtgatgaacggctttgagcgcgagctgcaaaacaacatccttggcctgatgccacaggcaattctctcttctgagcatggctctcttaacccgcagcaactcccagaaacggcagtcaaactggacggcgttaatcgcgtcgcacctattactaccggtgatgtggtactgcaaagcgcgcgcagcgtggcggtcggggtgatgctcggtatcgacccggcgcaaaaagatccacttacaccgtatctggtcaatgtgaaacaaactgacctcgagccggggaaatataatgtcatcctcggcgaacaacttgccagtcagctaggcgttaatcgcggtgatcaaatccgcgtgatggtaccatctgccagccagttcacgccgatggggcgtattccaagccagcgcctgttcaatgtgattggcactttcgccgccaacagtgaagtcgatggctatgaaatgctggtgaatattgaggatgccagccgtctgatgcgttatccggcaggcaatattaccggctggcgtttgtggctggatgagccgctgaaagtcgacagtttaagtcagcaaaaactgcctgaaggcagcaaatggcaggactggcgtgatcgtaaaggcgagttgttccaggccgtacgcatggaaaaaaatatgatgggtttactgctgagcctgattgtcgccgttgcggcgtttaacattattaccagtctagggctgatggtaatggagaagcagggcgaagtagcgatcctgcaaacgcaaggcttaactccgcgacaaatcatgatggtctttatggtgcaaggggccagcgccgggattatcggtgcgatcctcggagcggcgcttggcgccctgcttgccagccagttaaataatctgatgccgataatcggcgtcctgcttgatggcgcggcgctgccggtggctatcgaacctttacaggtcattgttattgcgctggtggcgatggctatcgcgctgctgtctacgctttaccctagttggcgcgctgccgccactcaacccgctgaggctttacgttatgaataagatcctgttgcaatgcgacaacctgtgcaaacgctatcaggaaggcagtgtgcaaaccgatgtgctgcacaatgtcagtttcagcgtcggcgaaggtgaaatgatggcgatcgtcggtagctctggttccggtaaaagtaccttgctgcacctgctgggcgggctggatacgccaacctccggcgatgtgatttttaatggtcagccaatgagcaaactgagcagcgcagcgaaagctgaactgcgcaaccagaagctgggctttatttatcagtttcaccacctgctgccggattttaccgccctggaaaacgtggctatgccgctgctgattggcaagaaaaagcccgctgaaatcaacagccgtgcacttgagatgttaaaagcggtggggctggatcatcgtgcgaatcaccgcccatctgaactttctggcggcgaacgccagcgtgtggcgattgcccgtgcgctggtgaataacccgcgcctggtactggcggatgaacctaccggtaacctcgatgcgcgtaacgccgacagcatcttccagttgcttggggaattgaatcgcttgcagggcaccgccttcctggtggttactcacgacctgcaactggcgaaacgtatgagccgccagttagaaatgcgtgatggtcgtctgacggcggaactgagcctgatgggggcggagtaatggcgatgcctttaagcttattaattggcctgcgttttagtcgcggacggcggcgcggcggcatggtgagcctgatctccgttatttctaccattggcattgccctcggcgtggcggtattgatcgtcggcttaagcgcgatgaacggctttgaacgcgaactgaacaaccgtattctggcggtggtgccgcatggtgaaatcgaggcggtggatcagccgtggactaactggcaggaagcactggatcacgtgcaaaaagtgccgggtattgccgctgccgcgccgtatatcaatttcaccgggctggtggaaagtggcgcgaatcttcgcgcaatccaggtgaagggcgttaacccgcaacaggaacagcgtctgagcgcattacccagctttgtccagggcgatgcgtggcgcaattttaaagcgggcgaacagcaaattatcatcggcaaaggcgtggcggatgcgctgaaagtgaagcagggggattgggtgagcattatgatccccaacagcaatcccgagcataaactgatgcagccaaaacgtgtgcgtttgcacgttgccggtattttgcagttgagtggtcaactcgatcacagttttgccatgatcccgctggcggatgcccaacaatatcttgatatgggttccagcgtgagtggtattgcccttaaaatgacggatgttttcaacgccaataagctggtacgcgatgcgggtgaagtgaccaacagctatgtttatattaaaagctggattggtacttacggctatatgtatcgcgatatccaaatgatccgcgccattatgtatctggcgatggtactggtgattggcgtggcctgtttcaacatcgtctccaccttagtgatggcggtgaaagacaagagtggcgatatcgcagtattaagaacgctgggggcgaaagatggtttaattcgcgccatctttgtctggtatggattgctggcagggctgttcggcagcctgtgtggtgtgattatcggcgtagtggttagtctgcaacttaccccgattattgagtggattgaaaagttgatcggtcatcagttcctctccagcgatatctattttattgatttcctgccaagcgaattgcactggctggacgtcttctacgtactggtcacagcattgttgctgagtcttttggcaagttggtatccggcgcggcgcgccagtaatattgaccctgcgcgagtccttagcggccagtaaaggcagtacattaaaacaaggagcggcaatgtattacgggtttgatattggtggaacaaaaattgcgcttggcgtgtttgatagcggtcggcagttgcagtgggaaaagcgggtgccgacaccgcgtgacagctatgacgcatttttagatgcagtgtgtgagctggtagctgaagctgaccaacgttttggctgtaaaggttctgtcggcatcggtattccgggaatgccggaaacagaagatggtacgctgtatgccgccaatgtccccgctgccagcggtaaaccgctgcgtgccgacctgagcgcacgtcttgatcgcgatgtacgccttgataacgatgccaactgttttgcccttagtgaagcctgggatgatgaatttactcaatatccactggtgatggggttgattctcggcaccggtgttggcggcgggctgattttcaacggcaaaccgattaccggtaaaagctacattaccggcgagtttggccatatgcgtctgccggttgatgcgttaaccatgatggggttggatttcccgttacgccgctgcggctgtggtcagcatggctgcattgaaaattatctgtctggtcgcggttttgcgtggctgtatcaacactattatcatcaaccgttgcaggctcccgaaattattgcgctttatgatcaaggcgatgagcaggcaagggcgcacgttgagcgttatctggatttattagcggtttgtctgggaaatatcctgaccatcgttgaccctgacctggtcgtcattggtggtggcttaagcaatttcccggcaatcacaacgcaactggcggacaggctgcctcgtcatctcttacctgtagctcgtgttccgcgcattgaacgcgcgcgccacggtgatgcgggaggaatgcgtggtgcggccttcctacatctaaccgattaaacaacagaggttgctatgctgagccgtcggggtcatcggttaagtcgttttcgtaaaaataaacgccgcctgcgcgagcgtttgcgtcagcgtatttttttcagagataaagtggtgccggaagcaatggaaaaaccaagagtactcgtactgacaggggcaggaatttctgcggaaagtggtattcgtacctttcgcgccgcagatggcctgtgggaagaacatcgggttgaagatgtggcaacgccggaaggtttcgatcgcgatcctgaactggtgcaagcgttttataacgcccgtcgtcgacagctgcagcagccagaaattcagcctaacgccgcgcatcttgcgctggctaaactgcaagacgccctcggcgatcgctttttgctggtgacgcagaatatcgacaacctgcatgaacgcgcaggtaataccaatgtgattcatatgcatggggaactgctgaaagtgcgttgtagtcaaagtggtcaggttctcgactggacaggagacgttaccccagaagataaatgccattgttgccagtttccggcacccttgcgcccgcacgtagtgtggtttggcgaaatgccactcggcatggatgaaatttatatggcgttgagcatggccgatattttcattgccattggcacatccgggcatgtttatccggcggctgggtttgttcacgaagcgaaactgcatggcgcgcacaccgtggaactgaatcttgaaccgagtcaggttggtaatgaatttgccgagaaatattacggcccggcaagccaggtggcgcctgagtttgttgaaaagttgctgaagggattaaaagcgggaagcattgcctgatgcactacgcttatcaggcctgcaaggggacgcaattaattgaatttgcgggttttgtgggccggataaggcgttcgcgccccatccggaataatacacgcgcacttttccggcctcttttatcgtttactcgtcaataacaatgcggcaataaacgtacagacaccaattagccctgcccagagtgggcttattctggtaatcgcaaagctattatcgatatacaaacataaagcctgataacccatattggcaatagtcatcgccactgcaaattttaacgcataaataaaacgagtcgtgtagtaaaagatcctggaaaataagataaacgtcgcagcccaggcgataaaacctaatgtgttggtgctgccggggggagcattttcatgctgttgtcctggatgcggataatacgttagtggcggcgtgctttgttttaatatctgtgcttgtagaacagccaatgcattattgattccctgataccagagatctgcatttaaataagccagcgtgtgattttctatcagaaggccgagatgtttatcgtccagaccactttcaacctggccgttggtgatcataattaaccgtggttcgcgggtagtaaatagtaacagaacacttccttttacatcactcaaactagaactcgcatgcgccagcatcgctttaccattttgtctgagactggcttcattattaatgtcgggtaaaaccacaataaacggtgcaattcccgtttgttggcgaaaaagctcggctttatgcgcgatctcttcagcatctggtacagtaccggtaacgtccgtaaaaagtgtcttcattattggaattaatggcttgctggctgctgtcagaggcaggagtatcagtaaactgagcagtataatgaattttttcatgggcgggacttccgtttcctgcgactttttttagaggagggcatacttattaataaaccgacggcgataaaaataacgcccataatgccgataaacccccatttaaaaaaattaacccacgggttatttatctcagccttttcaggatgcccgggagaataataaacattaactttatcgccttcgctgtcttcataaaaatcgctgccgatactgctattgaaaattagcgtgtaatctggcgtcggtcgaaaggcaacgacgggataccagctaccatctttacccgtgcgatgagaatgactggagtgccagacggtatcaacaatgacgccttcggtatgaatcgcgtctttgctataggtgaactggttataaaagacaacaacagaaatgaggatcagtaccagaccgataccgaggaatatacgaaagaaaactttactgtcctgactcattagccacatccttgctaactaaaaaacgggcggtaataccaccgcccgcttgctgaattaacgtcctgctttcagcttctgataatactcttcataaatgctgctggctgcgccaacgtcattctgccattcgccatttttaatggtttcagcatccgggtagagtgttttatcgttcgccacttctggacttaacagcttacgcgccgcaaggtttggcgttggataaccgatagtttcagcaacctgttttgccacatccgggcgcagcaggaagttgatcaatttcagcgcgccttctttgtttttggcatttgccgggatcgccaggctgtccatccagaaaatgccgccttctttcggccacaccacgtcaattggcgtacccgcctggcgtgcaacgaaagcagaaccgttccagatcatgccgaggttaacttcgccttccatgtacgggttcgccgggttatcggagttaaaggctgccacgtttggcatcagttttttcagctcgttatatgcagcttcaatctctttcggatcggtggtgttaccggagtagcccagcttacgcagcgccatctggaacacttcacgggcatcgtcggtcaacagcaggctgcctttgtactctggcttccacagatcggcccagctggtgacagatttcggatccaccgcatcaccgttaacaccaatcgccgtcgcaccccagatatacggaatggagtagtcgttattcgggtcaaaaggcttgttgagcatgtctggatcgagattgctgaagtttgttaacttgctcttgtcgatcttctggatcatcccttctttacgcattttatcaacgtaataggtactaggaaccaccagatcataggcaccgtctttgtatgttttcagcttggcgtacatggtttcgttgctctcgtaagtgctatagataaccttaataccggtttctttggtgaactgttcaagcagtcctggcggcacgtactcggtccagttgtagaaatacagcgtgttgttgtcatcggcgtgagcggcgctcatgcccagtgccagagcacccgccgcgagcaggtggcgactccattttttcatttaacgtcccctgtgttacctttcgttttatcacgagcaataagctggctggcaataaccatcaccaggctcagcaccagtaatatggttgccagcgcgttaacttccgggcttacgccgactttgaccatgctataaatttttaacggcagaatttcataacttggtccggtgacgaagctagaaactaccacatcgtccatgctcagggtaaagcttaacacccagcccgccgccaccgctggcattgccagtggcagaatgatttttcgcagaatggtaaattcgctggcaccgagatctttcgccgcttccagcattcgcacgtcaaaacctttcaggcggctatacaccgtcaccaccacaaatggcaggcagaaggtgatatggctgaacagcaggctccagaagccaagctgaatacccagcagcataaacagcaccagcaggctaatcgccatcacgatatctggactcatcatcaccacaaacagcattccgctaacgaacggcttaccacgaaagcgataacggtacagcgcaactgccgtcagactaccgataagcgtagcaaacgtcgcgctaaacaccgccattgttagactatgctgcgctgcctgtaacaggctgtcgttgttcatcagcaggctataccatttggtggtaaagccctgccagttgatgccaaagcggctgctgttaaaggagttcacaatcaaaataatgattgggatatacaggtacgcgtagatagcggtcataaaaccgccgcgaagcagtcgaccgatcattcgagttccaccttcttattcagcaaacgagaagcgcgccagtaaaccagcaacatcaggcccattacgatagtcagcgtaatgctggtagctgcaccaaacggccagtcacgaatattaaggaactggaccttgatgacgttaccgatcagcaggtttttcgcaccgcccatcaggtcggatacatagaacaggcccatcgctggcagcatcaccagcagacatccggcaataattcccggcatcgtcagtggaataatgatacggataaaagtctgtaacttgctggcaccgagatcgcgcgccgcctcaagcaacggcttatccagtttttcgatactggagtacagcggcatcaccataaacggcagcagaatgtaaaccagaccgataatcaccgcactgggcgtgaacatgatacggattggtgtgtcgataacgcccagccagagcaaaaactcgttgagatagcctttggtgctgaggaaaattttcagcccgtagatacgaattaaactgttggtccagaacggaacaatcagcagaaacagcagcagcggacgcaccttgtgtggcaacttcgccagaaaccaggcaaacgggtagcccagcaccaggcaggcgagggtggcgatcagcgccatattcaggctgtgcaatagcacttcaaaatagagcggatcgagcagacgcgtgtagttatccagcgtaaagaccattttgacaaaactggcgtcgtcgcgggtcaaaaagctggtgccaatgatcatcaggttgggcagaaagacaaacaacacaagccaaccgacaatagtgacaatcactacattctggaacttacttgtgttcttcatcagccagtacgacctcccagctttctacccaattaatggccattttttggtcgagagagtggtcaaagtcaggatcgtcttcattgaagaattcgctgaccatcaccatcttgccattttccagttcaacaacgctctccagcgtcatgcctttgtagttacgctcgcgaacgtaaccaatcagcccttcagcgtggttgtcgtcgttaatctcttcaacacgtaagtcttccgggcgcagcagaacatgcagtttttgccccggttcaacggcgaagttaacgtagatattacattcgcggccttcaacgttggcgcgtacgcgctgctcgtctagacgttcgatgacagtggcgttaaacatattgatttcgccaatgaagccggcaacaaacaggtttttcggctcttcgtagatttcacgcggcgtgccgtcttgctcaatgcgaccatcgcgcatcaccacaatcctgtcactcatggtgagtgcttcttcctggtcgtgagtcacaaagacgaatgtaatgccaagcttacgctgtaacgctttcagctcgttctgcatttgcttacgcagtttgtaatccagcgcactgaggctctcatccagcaacaacagacgaggcttgttaaccaccgcgcgagcaatggcgacgcgttgctgttgaccaccagagagctgatgcggtttgcgttgagcgaaggtttccaactgcaccatccgcagggcttccatcacgcggggcgtaatttcagcagcgggggttttttgcatgcgcaacccaaaggccacattttcgaacacggtcatgtgggggaaaagtgcgtagctttggaaaacagtgttcacatagcggttttccgccggaacgtgggtgatgtcctcgttatccagcatgatgcgtccggaatcaacagtttccagacctgcaatcaggcgaagaacggttgttttaccgcagccagaagggccaagcagcgtgaggaactcgccattgttgatagtcagatccagctggggaatgacctctttaccatcaaagcatttgcgaattcccgccaattgcaccagcggactaaggctactcggttgtttattcaattttttactctgtcccatgtaaacgcaacggatggcttaccgatgcggggtttgtggttaaccaccttggtgactcttaatgagggcggtaattctacggcaaaccgcttgaatcgccaatctttgttgtgaattactggcttagctttatattcattaaggtaatgctgataaatattcccgcttgcaggggtaaaagtgacctgacgcaatatttgtcttttcttgcttcttaataatgttgtcacaaaaagtgagggtgactacatggataaactacttgagcgatttttgaactacgtgtctctggatacccaaagtaaagcaggggtgagacaggttcccagcacggaaggccaatggaagttattgcatctgctgaaagagcagctcgaagagatggggcttatcaatgtgaccttaagtgagaagggcactttgatggcgacgttaccggctaacgtccctggcgatatcccggcgattggctttatttctcatgtggataccagtccggattgcagcggcaaaaatgtgaatccgcaaattgttgaaaactatcgcggtggcgatattgcgctgggtatcggcgatgaagttttaagtccggttatgttcccggtgctgcatcagctactgggtcagacgctgattaccaccgatggtaaaaccttgttaggtgccgatgacaaagcaggtattgcagaaatcatgaccgcgctggcggtattgcaacagaaaaaaattccgcatggtgatattcgcgtcgcctttaccccggatgaagaagtgggcaaaggggcgaaacattttgatgttgacgccttcgatgcccgctgggcttacactgttgatggtggtggcgtaggcgaactggagtttgaaaacttcaacgccgcgagcgtcaatatcaaaattgtcggtaacaatgttcatccgggcacggcgaaaggagtgatggtaaatgcgctgagcctggcggcacgtattcatgcggaagttccggcggatgaaagcccggaaatgacagaaggctatgaaggtttctatcatctggcgagcatgaaaggcaccgttgaacgggccgatatgcactacatcatccgtgatttcgaccgtaaacagtttgaagcgcgtaaacgtaaaatgatggagatcgccaaaaaagtgggcaaagggttacatcctgattgctacattgaactggtgattgaagacagttactacaatatgcgcgagaaagtggttgagcatccgcatattctcgatatcgcccagcaggcgatgcgcgattgcgatattgaaccggaactgaaaccgatccgcggtggtaccgacggcgcgcagttgagctttatgggattaccgtgcccgaacctgttcactggcggttacaactatcatggtaagcatgagtttgtgactctggaaggtatggaaaaagcggtgcaggtgatcgtccgtattgccgagttaacggcgcaacggaagtaagcgaaaagggatgcggcatgtgatgccgcatccggcttaaatccaaacttacccttcgaagaaccaatacccgctattgaccagcgccgcgagcatcgcgaggaaactcggatcttccagcgcatcgccaaaattctccgcagtcagcgcaatgttgctggcgagtgcatccagtgccggacggtgcggggaatcgatcttctcaccattggcatacacgtcgtcgccaatgcgcaatacgcgcagaccacccaggcgcaccagcacttcaccttgtttcagcgcatcgtagatttcatccggctgataaggcggctctggcggcgcgatatccagttcatgacgactctgggatataaactcgccaaaccattgcttaaagtgttccggctggttgatcaattcgagcatcatctcacgcagtttatccatctcttgcggcagaacatccgcaggatgagcgcgaggtggaacatccggatcgctgtagtagttgccgcccagttcacgttgcagcacataatcggcaaatccactaatcagttcccgcgtatttggcgcgcgaaagcccacggaatagttcatcgcattttccagcgcgtagccttcatgcgggaatcctggcggaatataaagaatatcaccaggctccagctcttcatcgatgatggcttcgaacggatcgacctgtaacagatccggatgtgggcagtgctgtttcatttgcagcttttcgcccactcgccagcgacgacgtccggtaccctgaatgataaacacgtcgtactgatcgagatgcgggccgacgccgccgccgggtacagaaaaagaaatcatcagatcatcaatacgccagtccggtagttcacggaacggtcgcatcagcgcggcggtcggctcatgccagtggttcactgcctgtaccagtaaactccagttggtttcaccgagatgatcgtagctttcgaacgggccgtggctgacctgccatttgccatcctggtgactgaccagtcgactgtcaacttcgctttccatcgccagacccgccaactcgtctggagagatcgggtcaataaaattattaaagccgcgttttaacaccaccgggcgtttctgccagtgacgttcaagaaaatcgggccagttaagagtgagttggtattccatgttaagcatccacaggctggtatctgcaaccgattataacggatgcttaacgtaatgcgtgaagtatgggcatatttattcatctttcggcgcagaatgctggcgaccaaaaatcacctccatccgcgcaccgcccagcatgctctctccggcgacgattttaccctcatattgctcggtgatttcgcgggctaccgccagccctacaccttgcccagggcgtaaagtatcaacccgttgaccacggtcgaaaatgacctctcgcttgcttaatggaataccggggccatcatcctcgaccacaatatagagatgctcgtcggtttgccttgcagaaatttcgacaaactcgaggcaatatttacaggcattatccagcacgttgcccatcacctcgacaaaatcgttctgctcaccgacaaagctgatctctgggctaatatcgagagagatattgacccctttgcgttgatacactttgttcagcgcactggtgagattgtccagcagtggggcgaccggatgcagctcgcggctgagcaatgtcccgccgcgcatactggcacgatgcaggtagtagccaatttgctgactaatgcggctgatttgctccagcattaccggctcagcatcactgacgctcatcttttcactacgcagagaacgcagcgtactttgcagcaccgccagtggcgttttcagactatgggtcaggtcggtgagcgtcgtacggtatttgtcgtaacgttcgcgttcactttttaacaatcggttcaggtttcgtaccagactggtcagttctcgcgttgtggctggattgagcaattcgcggttatgttcttccagttcgcggacttcttttgccagggcttcgatggggcgtaaactccaccaggcggcgacccacagcagcgggatcactaacagcagattggcactgagcacatagataaaccagctccagaccatataggaactttttagctccaccggaatggtatccaccaccacaatggttaattttggcatccggcttgttgccgggtagacgtttactgccacgctgtgggtcatctccgcgtcgtcatcatcttcccgcacttcctgcaactgttgctgtatgctatgatctccactcagcaagaggctggtatcgttaacatccgcttcaatttcatgaaaaccattgcttttcagccagtcaggctggatcatcttcatcagccagggcacgtcacgttgcgcccataaaagctgcccgttctcatcataaattagcgtcatggtggggctttgcttgtcgatattttcgggtaactcgacatgcaacttattgttttcccacttcgcaagggtatagaacagattgctctcgccacgtaacagccgaaacgtagttttatcgaaactgacgctataaccgatcagcgcgaccattccgtaggcaaggctaagcaccagtactaccgctgccgttgccaacagaaaacgtacccgcaggctgagcgggaaaaaaagacgcagtaattttttcatcagcgcaattcgaacagatagccctggccgcgaacggtggtaatcacttcttggggatattgtgcctgaatttttttgcgcagacgtcccatcagtacatcaatggtatggctttcccgcagctccgcatccggatagagttggagcattaagctatctttgctgaccactttgccattattgcgtatcaacgtttccataatagtgtattcgaacgcggtcagtttgatcacttcgtcattaatagataattcacggcgagagagatcaacctgaaacggggggaggctaatgacctgactagccagaccgctattacgccgcattaatgcctgcattcgcgccatcacctcttcaatatgaaacggtttagtcacataatcatcagcaccggcacttaatacttcgactttgtcctgccagctttcacgggcggttaataccagaatcggcagactaacatcgttgctacgccagcggcgaatcagactcagaccgtcctcgtctggcaatccgagatcgacaatcgcaatatccggtatatgttcattgagataataatcggcttctttggcatcttctgcgtcatcgacctgatgaccagcatcctgaatctgaactttaaggtggtgacgtaacaacgcattgtcttcaacaaccagtacgcgcatttttatttctccctgtcttaattattaaaatagtgtaacgcgattatgtggttatgggggtaaacattaaataaaccagcggggaggggaggtaaagtgaaaaaataaaaagcggataatcttaataagcaggccggacagcatcgccatccggcactgatacgaggtttatttcagctcatcaaccatcgtgatagctcgaccaatatagttagccggcgtcatcgctttcaggcgggctttctcttcttctggcaacgccagaccatcgataaactgcttcatgccttcggcgtcaacgcgcttaccgcgagtcagctctttcagcttctcgtacggtttttcgatgccatagcgacgcataactgtctggattggttcagccagcacttcccagttgtgatccagttcatccagcagatggtcacggttcacttccagtttgctcacgcctttcagggtggattgatatgcaatcaaggcataaccgatacccacgccgaggttacgcagcacggtagagtcggtcaggtcacgctgccagcgggaaaccggcagtttgcttgccagatgctgcaataccgcgttggaaaggcccagattcccttcggagttttcgaagtcgatcgggttaactttatgcggcatggtggaagaaccaatctcaccagcaatggttttctgtttgaagtggttaagggcgatataaccccagacgtcacggtcaaagtcgatcagaatagtgttgaagcgcgcaacgcaatcaaacagttcggcaatgtagtcgtgcggttcgatctgggtggtgtacgggttccactgaatacccaggctggtgacgaactcttcgctgaactgatgccagtcaacttccgggtaagcggcgatgtgggcgttatagttaccgaccgcgccgttgattttgccgaggatctccacctggttaagctggcggtactggcgctccatacggtaggcgacgtttgccatctctttaccgatggtactcggcgtggctggctgaccgtgggtacgagacagcagcgggatatcgcgatactgaacggcgagatctttaatgccatcaatcagttgacgccagtatggcaggatcacttcatcacgcgcggttttcagcattaatgcgtgggagaggttattgatatcttcgctagtacaggcaaagtggatgaattcagaaaccgcgtgcagttccgggatctccgccactttttctttcaggaaatactcaaccgctttaacgtcgtggttagtggtacgctcgatagttttgatgcgcgccgcatcttcttcgctgaaactggcgacgattgcatcaaggtaaccgattgcgtcggcagcaaaagcaggaacttccttgatcgctgcgtgcgcggccagtttttgcagccaacgtacttcaacttgtacacggaatttcagcaaaccatattcgctgaaaatcccgcgcagcgcgctgactttatcgccgtagcgtccatcgacaggggaaacggcggtcagactggataattccatagatcacaactccggggttaaatgagcaagaatttgttttgcctgagtggtcaggcgattacgagaaaacatcagttgcagacgtccgccgccgacctggtgccagagcacggcggcgcgaatgcctgccagcagggttgcgcgaactttcgcctgcacttgtgggctttgcagtacagcaggggaaccggtgacctgaatgcgcgggccaagcgggctaatcacatcaacatagatagcagccatcgcgctcatcagcgtttcggactgtaaatcgaagtgttcgagctggcgttgcaggccgttgatccggttgcccagagtgtcgagcgcgcctttcgcactggagagtttgcgctcaagcaccatcaagctgagtgtgtagcgggttaattcggcgtttaagccctggcgactgctggcattgagcacgccgagcagggtttccagcccgacgcgcaggttggcttcgctaccgccaaaaaccgccagcgtgctgctggggttcatatcaataatactgttgagactgacgtgtagcgcatcggcatcacaatgcccctggtgagcgagttgttgcaccaggcgtgcgctctgacaaataccggccagggcgagggtgatgtcatagtaattctttgccacgttcactgcttccttgttttaagtaaagataataatcagaccggcagcggcagacgctgctcaataataccgccaccgaggcacacttcaccgttatagaagacggcagactggcccggcgtcacggcggcaaccggttcatcgaaaatcacttcaatgcgatcatcgtccagcgccttgacggtgcaagggatatcggtctggcgatagcgggtttttaccgtgcaacgcatagtgccggtgaatggttcgcgatcgacccagtgcaactgctgggcaatcaacccgacagacatcagccgcgggtgttcatggccctgagcgacaaccagaatgttgttttcgacgtctttgtccaccacataccacggttcttcggtaccttctttggtgccaccgatacccagacctttacgctgaccgagagtgtgatacatcagcccctggtgctcaccaatttcatcgccatcgacggtaatgattttgcccggttgcgccgggagataacggcccaggaactcgcggaatttacgttcgccaatgaagcaaatgccggtagagtcttttttcttcgcggtgaccagaccaagatcttcagcaatcttacgcacctgcggtttttccagttcgccgaccgggaacaggctttgcgcaatctgctcatggctgagcgtataaaggaagtagctctggtctttattgctgtccagaccacgcagcaggcggctcttgccatcgacatcggcccgacgtacgtaatgaccggtagcgatataatcggcacctaaatcttcggcggcaaattcgaggaaggctttaaatttgatctctttgttgcacagaatatccggattcggcgtgcgaccggctttatattcggcaaggaacagttcgaagacgttgtcccagtactcggcagcaaagttaacggtgtgcagttcaatgccgagcttgtcgcagacagcctgggcatcagccagatccgctgccgctgtgcaatattcctcaccgtcgtcttcttcccagttcttcataaacaggccttcgacctgatatccctgttgttgcaacagccaggcagaaacggaggaatcgacaccgccggacatgccgacgattactttttttgcggtttcagacattggatcactcacgacattgaacttcaaggcggcgtattctatcacgcagccttttagatgacaccctttgtaaaaggccagttaaaatcgccaatcatctccagcggataacgttgcccgctttgataacaacgaatactttccgccaccagcgggctacgaagattactcgcctgtaaaatttcttcggcgctgacccaacggcagcagtcgatatcgctgtcatgaggctgggtcgggcatatttgctcaagctcaatggcaaagaggaaacgcaaaaacggcgttttatctggcgcaatccactgatgcatacgaataaagtgttgcggctgcgcgctgatgccggtttcttcccacagttcacgggcggcggcttccactaaggtttcatcggcttccagatgcccggcaggttggttccataacgctttaccattaatcgtctcttcaacgactaaaaatttgccttctgcgtgcaccacgcaagcaacggtaacgtgcggtttaaacattttgcatccttaatctgtcacttctcgccattcaccattggcaagattatccaaagagtaatcacccatcgcatagcgaatcagtcgcagcgtggggaagccaacatgggcggtcatgcggcgcacctggcgattacgtccttcatataaggtgatcttcagccagctggtgggaatacttttgcgttcacgaattggtggattccgcggccataaccacgcgggttcgtcaaccagctccgcgccggcgggcagggtagggccatcatttaaggttacgccattgcgcaaggcttcaagtgcgtcttgtgtgggaataccttccacctgcacataatagatttttccggtgcgtttacccggctgggttaaacgcgcctgcaacgcgccgttattggtcagcaccagcaacccttcgctatcgcggtcaaggcgacctgctgcataaacaccctgaaccgggatgaattcttttaatgttttgcgtccggcttcatcggtgaactgcggaagaacatcgtagggtttattgaacaggatcacacgcgtgggctggttttcaggtttacgcctggtagaacgttggctgctgaatcgcttaacctggtgatttctaaaagaagttttttgcatggtattttcagagattatgaattgccgcattatagcctaataacgcgcatctttcatgacggcaaacaatagggtagtattgacaagccaattacaaatcattaacaaaaaattgctctaaagcatccgtatcgcaggacgcaaacgcatatgcaacgtggtggcagacgagcaaaccagtagcgctcgaaggagaggtgaatggaaagtaaagtagttgttccggcacaaggcaagaagatcaccctgcaaaacggcaaactcaacgttcctgaaaatccgattatcccttacattgaaggtgatggaatcggtgtagatgtaaccccagccatgctgaaagtggtcgacgctgcagtcgagaaagcctataaaggcgagcgtaaaatctcctggatggaaatttacaccggtgaaaaatccacacaggtttatggtcaggacgtctggctgcctgctgaaactcttgatctgattcgtgaatatcgcgttgccattaaaggtccgctgaccactccggttggtggcggtattcgctctctgaacgttgccctgcgccaggaactggatctctacatctgcctgcgtccggtacgttactatcagggcactccaagcccggttaaacaccctgaactgaccgatatggttatcttccgtgaaaacagcgaagacatttatgcgggtatcgaatggaaagcagactctgccgacgccgagaaagtgattaaattcctgcgtgaagagatgggggtgaagaaaattcgcttcccggaacattgtggtatcggtattaagccgtgtagcgaagaaggcaccaaacgtctggttcgtgcagcgatcgaatacgcaattgctaacgatcgtgactctgtgactctggtgcacaaaggcaacatcatgaagttcaccgaaggagcgtttaaagactggggctaccagctggcgcgtgaagagtttggcggtgaactgatcgacggtggcccgtggctgaaagttaaaaacccgaacactggcaaagagatcgtcattaaagacgtgattgctgatgcattcctgcaacagatcctgctgcgtccggctgaatatgatgttatcgcctgtatgaacctgaacggtgactacatttctgacgccctggcagcgcaggttggcggtatcggtatcgcccctggtgcaaacatcggtgacgaatgcgccctgtttgaagccacccacggtactgcgccgaaatatgccggtcaggacaaagtaaatcctggctctattattctctccgctgagatgatgctgcgccacatgggttggaccgaagcggctgacttaattgttaaaggtatggaaggcgcaatcaacgcgaaaaccgtaacctatgacttcgagcgtctgatggatggcgctaaactgctgaaatgtagtgagtttggtgacgcgatcatcgaaaacatgtaatgccgtagtttgttaaatttattaacgggagcgtaacgctcccgttgttttttgttaggctgctaacggttatcaaaattttatcaaaaaaagttatcaaaacccctcggtagttttggggtaggctggccggtcaggtggtagttctactactagtctcccacatagatattccttagctttttattattgctggcggacgctcgttaatatttaaggtcttcattgattaagacatccccaaagttagttatgtattcactgttattaggacaattatgaattaccactccttacacccgctcaaatattgttaaattgccggttttgtatcaactactcacccgggactcgccaggggacagccaacaggcattgggtgcaatcaccttagcgttcaggtacatgcggaatgtaaaaaaggccgcgagcgcggccccttcacatacatctttagtactgagactgtttaacctagggaattattatcgtattatattgcattacaactcccaacagtgacatatgaacttcctgctttactccacgactttaatatttcaaggccatgtgaagaacatatttcttgcactgcgagttcatcgagtaatccatagtaagaaacactttttgaatttttgtaaatgtatccgtaaagatgttttcttcctgtttcgtattttttgaagtatgagcttttatattgatttacaataagagtctcacctcctgattttagtaatctcttgatgctaagaactatcagataattcaaagcgtggctgtgatgataggaattatgttttttacgtgaatgagaataatcttaaatgaggaataactcattgattgacaatatttttattcaagaagtgtcattgactgttaacgcaatgttgtaaaggtaagataatctgatttatcaatattattgtgtgatttttatgtgagcagaagatattcatcagcaacgattacattagtcattttattttgccgacggcctcattgtcgaaagataagcgtacgacagtattatcagaaaagagtgattttttatccaactacacttcagcgcactgcgtgtaaaaaatgcctctttcttatgcgggatatcatcatttcatcatgatgtctttggtgagcggtgaacacaatgcacctgcgctgtctcttcaggatgaatcccctggtctggtgcctgcgggctgatgttgcagcagagcttaggagtcttagacgctactatcatttatccaatggcatggaaagcaaaagtgtcgatacccgcagtatatatcgtgaactgggtgcaacgctgagttacaacatgcgcctggggaacggtatggaaatgaaccctggctgaaggcggctgtgcgcaaagaatttgtcgatgataaccgggtgaaggtgaataatgacggtaatttcgtcaatgatttgagcggcagacgtggaatataccaggcagctattaaagccagtttcagcagtacgtttagcggacatctcggggtggggtatagccatggtgccggtgtggaatccccgtggaacgcggtggctggtgtgaactggagcttctgaccatcaacgattaaactgcgcttcggcgcagttttcgtttacaggatgttgaaagggaaaattctggggcaaaaaaagcccgccagttacggcgggaaacctcatcctatgggagaacaatgaataatgaaattgcggggttatcatctcccagtatatccatactaacaataaggttatttactcaaccaggcataaacattttgttttgtgcgtgggaacagccttaaggtgtaaagggggaggtggaaatagcaatgaggagtatcagcaagaatactcgccgctttaccacaacgtggatgagagggatgaaaaactcaaggcagagataactctgccttgaagataaatgcgcttttacagcgggcttatttcagctcttctgcttccggtaaggtcacgttcagctcaagaatagaaatatcgccatctttttgctcaagctgtacggttaccatctcaggatcaatttgtacgtatttacaaatgacctcaagaatatctttacgcaactgcggcagataatgcggttctgcatcgctgcgacggcgttcagcaacaataatctgcagccgttcttttgcaatgttggctgtgtttttcttccggctgagaaagaaatcgagtaatgccataacttatcctccgaacaagcgtttgaggaagcctttcttctcttcttcaatgaagcggaaaggacgttcttctcccaacagacgttctacggtatctgcgtaggctttacccgcatcggcgttaatgtcgagaatgaccggttcaccctggttagaggcgcgcaatacactttgatcctctgggatcacgccgacgagtttgatgcgcaggatctccagcacatcttccatgctcagcatgtcacctctgcttacgcggcctgggttatagcgcgttaacagcaggtgctctttaataggctcttcgccattttctgcgcggcgacttttgctcgccagaatgcctaaaatacggtcagagtcgcgtacactggagacttccgggttggtggtaataatggcttcgtctgcaaaatagagtgccattaacgcaccggtttcaatccctgccggggagtcacaaacgataaattcaaaatccatcgctttcagatcatcaagaactttggcgaccccttcacgggtgagggcatctttatcgcgtgtttggcttgccggcagaatatagagattttcagtacgcttatctttaattaacgcctgatttagcgttgcatcgccctgaatgacgttgacgaaatcgtaaacgacccggcgttcacaacccataatcaggtcgagattacgcaggccgatatcaaaatctatcacgacagttttctttcccttctgggccaaaccagtggcgatggccgcgctggaggttgtcttaccaacaccccctttgccgctagtaacaacaataatgcgtgccatagaaattccttgttaaaaagggatcaatttaacggttgaacggtcaaagcgttttcgactaactgcagtcgcgccgctttgccataaaattctgctgggatttgatcactcagccagtattcacctgcgatggacaccagttccgccatcaggttcgtacaaaatatttgcgtttcccggtcaccacttgcccctgccagcgcacgaccgcgcatcatgccatagacatgaatgttcccatcggcaatcaattcggccccagcgctaacgtggcttgtaacaatcagatcacattgtggagcataaatacgctgaccggaacgcaccggggtatctattaaacgcgtttttgtgaccggcgttgtattttgcgctggagcctgcggtgtgggagctggacgtggcgctttttcctttccttccgtcaggataggcagccccatcttttcaatttcggctttaagttgcgcatctttgcagccacttacgccaataacccgcaaaccggttgcgctaaccgccttatgcatcgcactccagtttaccgggtcttccagtgcactgacgttgagtacaacgggggcatgttttaaaaatgcgggggcctgagcgattttgtcttccagcgcctgatggataaccttaggttctgcctcatgcagatgaaccacagataaagtgaagctactgcctttaagctcgattggcgtgttactcatcctggccttactcaattagctattaatcatcgccagcgcgcgatgatgttccgaagactataaggcatgttatagtctggattatattgaggcaagtcaccctcccatttattcagagtaaaagtctattctgtgataaatggcgctgattcatagcttaaaaaatacccttgtcaatcaacccattgccgtcgtacttttgattgttcttatttacgcttcctttttccgcaccctaatcgtgacagcatctccagacctgtttaaatatccagtattgaggcaagtgtattttttcaccacgccaggctttcttaactttccattttttgcggcatcattaaagaacagatacccgttatcttaatatccgccacagaattgctctatcatagaaaccgcagaagacgtctgatacttctgtcaggtcatcgtaactcgtccaggtcagcggttttgattacggattgatgatgaaatgagcataagtgttgtacggttggattatcaggatgtgctatgaatatgatgcgtattttttatatcggattgagtggtgtggggatgatgttcagtagtatggcgtctggaaatgacgctggcggacttcaatctccggcgtgcggcgttgtttgcgacccgtatatttgtgtgaacagtgatggcatttccccagagttaacaaggaaatatctcggcgaaaaagccgctgaaaacttacaaagtttacaaggctacgatcccagcgaatttacattcgctaacggtgtattttgcgatgttaaagaaaaattatgtcgtgatgatcgttattttggtgtggatggtaagcggagtggaaaaatcaatcaaaccaccacaaagatgttatttatgtgtcgtgagtgatgtcttgtttacattatgttctattcgtcattaacctcttgagcgacagagaggagtggggcattaacgtttatgacggggagagtccccgtcggttgacatttacttaatttgaatatcgacgttatattttttagttttgtttttacgggcgtcgtttcgggtttgcaacactcgcagctcatatttgccagaagcagggagactgtattgtccgtgactatcgagttctggggaatatctggataaatcaacactatcatcgattcctggcccgaagaggtaagtatcagcgccttcattagagatactcacatgcactttctgaccttttttggcatagaaggtatatgtatcgtaatcgtatccctttatttcgccggagtactgagcgctgctatggccttttctgaactcaacattgacattcttacccgcagcaaagctcgtggaggttagcagtgcaagcagcaatacagccttcctgatgctcttgattttcattggtagtctcctgttcagaatgagtacgatgaactgttataatataacaatccctaacgggagaattccagtggctttcctgcgttcggtaaaatcacgttgcggcatttttgccggggggattacttataaagggggcatggactcaacaaaccgtagaaatctacagctggctggcttgtggcgcgggtttcattgatgttagcttatgccaaaacctggcatcttaaagagtaaaagtatgttttgtgtgatttatcgaagcagcaagcgtgaccagacctatttatatgtcgaaaaaaaagacgattttagccgtgttcctgaggaactgatgaaaggttttggtcagcctcagttagcgatgattctgccgctggatgggcggaagaaactggtcaatgccgatattgaaaaggttaaacaggcattaaccgagcaaggttactatttgcagttaccgccaccacccgaagatttgctgaagcaacatctttccgtcatggggcagaaaacagacgacactaacaaataaccgatatccggcggtggcattatctttgtcggcgcgggttttcatatccacgataaggtgaggggaacgttatgtatcaacatcacaactggcaaggtgcgctgctggattatccggtgagtaaagtagtctgtgttggcagtaactatgccaaacatattaaagagatgggcagcgcagtgcccgaagagccagtgctgtttattaaaccagaaacggcactgtgcgatctgcggcagccattggcgatcccatccgatttcggtagtgttcatcatgaagtcgaactggcggtgttgattggcgcgacactgcgtcaggctacggaagagcatgtccgcaaagccattgccggttatggcgtggcgctcgatctgacattgcgtgatgttcagggaaaaatgaagaaagccgggcagccgtgggaaaaggctaaagcgtttgataactcttgtccgctttccgggtttattcccgcggcggaatttaccggcgacccgcaaaatacaacgctgagcctgagcgtaaacggcgaacaacgccagcaaggtacgactgcggacatgatccataaaatcgttccgctgatcgcttatatgagcaagttttttaccctcaaggccggtgacgttgtgttgacaggcacgcctgatggcgtcggcccgttgcaaagcggtgatgagctgacagtcactttcgatgggcattctttgacaactcgcgttttgtaatactttttgccgcctgaaagcggcggcaaaacttgcatcgctgtgccagactggttataaggtgcgttttaacgtaatggcggaacacctgatgagcgatgtacctttctggcaaagtaaaaccctggacgaaatgagcgatgcggaatgggagagcttgtgtgatggttgcggtcagtgttgcctgcataaactgatggatgaagacaccgacgaaatctacttcactaacgtcgcctgtcgccagctcaatattaaaacctgtcaatgtcggaactacgaacgtcgtttcgagtttgaacccgactgcattaaattaacccgtgaaaatctgccaacattcgaatggctgccaatgacctgcgcttatcgtttgctggcggaaggtaaagatttacctgcgtggcatccgctacttactggtagcaaagcggcaatgcatggtgaacgtatctctgtgcgtcatatcgcagtgaaagaaagtgaagtgattgactggcaggatcatatcttaaataaacctgactgggcgcagtgataaatttaatagatgctgatgggggctttcttaatatacgtctggatgctcgccatttcgtagccctgtttttgaaagcgctctgtcataatgagagttacccgataccttattatcaacaggtaactctcaatctttaaaaaacgtctgtgtttttaaatgtgataaaccttataccttgagtacatggagagaataatcgcttatcagacttcaggtacctcaaagagtgtctttttaccgtgtcttttctgatactcattacaggtgttaatcatttttttggccgcttcttttagcaaagaaagcattaaatcatcataatcaacgtagaatctggttgtttcagtttccgtttttatctcaccgatggcggctatttcggtggttaatttcaatttggcggcatcgatatctttattcgcttgtttaaccgtgttagacagggtggtaaagaaattctgcacagattttaacttgttcttcaattctggaatcagttttccttcaactacgcccgcagcaatagaataggaaatgattaatccaaatggaccggcgacgacaccggctgcggcaccggcatatgcttccttcctgattttatctacctgactctggaaatagctgcttttttcactaaaatcattggttaactggctatctaacgccagcagtttcccggaagcgttgttgaaactttgactgcttaccagcagggatttttgcgcttcattcagcttcgtgatgccgtcatccagtaccttaatgagaatgtctttctgggcggatgctttcttctcattgtactcatcaaatagcaaaatatacgctgcgagcaattgcgtcgcaacaccacaccattcatacactgtttgggttgcttcaaaatacttatcctggctatccataagtaaggttttaatatcgccgactaaaacggaggctgcctgactatactcctgtttaaagcgacttaactcttttatggtttcatcaaaggtctgccaggggatgacctgatcgagatatttattataaagatctaatgctccatctgcggtttcgattgcgtttttaactacttctaccgttttatctgcaacgatttcagtcataatcattcgcctctttaaatatataaattgtaatgaaactcctgttttacaactattaataaattttacttcatctaattcatagttagccgggcgggatgcgtcaatgtctttatttctattaatatgataaatatcaaacaatgtttaatgtcattatggcgaatgcttctattctattttttagccgggtgatatttttcatttctgctggatgagcgtcgtcgccagaaggccacgtgagcacaagataagagaacgaaaaatcagcagcctatgcagcgacaaatattgatagcctgaatcagtattgatctgctggcaagaacagactactgtatataaaaacagtataacttcaggcagattattatgttgtttatcaagcctgcggatctccgcgaaattgtgacttttccgctatttagcgatcttgttcagtgtggctttcctagtccggcagcagattacgttgaacagcgcatcgatctgaatcaactgttgatccagcatcccagcgcgacttacttcgtcaaagcaagtggtgattctatgattgatggtggaattagtgacggtgatttactgattgtcgatagcgctattaccgccagccatggtgatattgtcatcgctgctgttgacggcgagtttacggtgaaaaaattgcaactacgcccgacggtacagcttattcccatgaacagcgcgtacagccccattaccatcagtagtgaagatacgctggatgtctttggtgtggtgatccacgtcgttaaggcgatgcgctgatgtttgccctctgtgatgtaaacgcgttttatgccagctgtgagacggtgtttcgccctgatttatggggtaaaccggtggttgtgctaagcaataatgacggttgcgttatcgcccgaaacgctgaggcaaaggcgcttggcgttaaaatgggcgatccctggttcaaacaaaaagatctgtttcgtcgctgtggcgtggtttgctttagcagcaattatgagctttacgcagacatgagcaatcgggtgatgagcacgctggaagagctaagcccccgcgtcgagatttacagtattgatgaggcattctgcgatctgacaggtgtgcgtaattgtcgcgatctgactgattttggcagagaaattcgcgcaacggtgctacaacgtacccatcttactgttggtgtggggatcgcccagaccaaaacgctggctaagcttgccaatcatgcggcaaaaaaatggcagcggcagacgggtggggtggtggatttaagtaatctggaacgccagcgtaaattaatgtctgctctccccgtggatgacgtctgggggattggacggcggatcagcaaaaaactggacgcgatggggatcaaaaccgttctcgatttggcggatacagatatccggtttatccgtaaacattttaatgtcgtgctcgaaagaacggtgcgtgaactgcgcggcgaaccctgtttgcaactggaagagtttgcaccgacgaagcaggaaattatctgttcccgcagctttggtgaacgcatcacggattatccgagcatgcggcaggccatttgtagttacgctgcccgggcggcggaaaaacttcgcagcgagcatcaatattgtcggtttatctccacgtttattaagacgagtccatttgcgctcaatgaaccttattacggcaatagcgcgagcgtaaaactgctgacgcccactcaggacagcagggatatcattaacgctgctacgcgatctctggatgccatctggcaagcgggccatcgttaccaaaaagcgggcgtgatgctgggggatttcttcagtcagggagtcgcgcagctcaatttattcgatgacaacgcaccgcgccccgggagtgagcaattgatgacggtaatggatacactgaatgctaaagagggcagaggaacactctattttgccgggcaggggatccagcaacaatggcagatgaagcgagccatgcttagtccacgttatacaacgcgaagttctgatttactgagggtcaaataaatatagcggcaggaaaaaagcgctcccgcaggagcgccgaatggattagcgaccgaacagatcacgttttttcgctttaaacggctgggaaatcaccaccagcactgcgacaatcaggtaagcgataaaaataccgagcagccactgcggcatttccagacctaaaaaatcccactgacgctcggcgcaatcgccagaggcgacaaacacttgcggcacccacttatccagcggcagccattccgggaaacgaaccataaaatcacaggtggcaaacgggctaggatagagctgaagcatggtgtgctcgtaagttaactgcacaccgcggaacgcactatacaaccagataaccatcgctacataacgcagcggagttttcggggcgatcgcgccaatcagcgcagcacccagaacgccgaataacgcgcagcgttcataaatacagagcacgcaaggtttcagtaacatcacatgctggaaccacagcgccgtcagttccagtgccagagcagtaaacgccatcaacagccacgcgccccggccttgactacattggttcaaaaatcgcaacataatcatttccctgcaatatgcatagagtgcgcagtttaaaccaattcattcgctgcgccaccaggaggcagcaaaaataggacgcaattggacaattatcgggcgaaaaggcaaaccgggcatttatatgcccggtaagttgttatcaaagcgttgctatccagcccatttgcataaaccattcggttacaggggcaagcgtaaactcgacgcagagcaagccgacgagtgtcaggacgagggtgtaaggcagggccatccacaccatgcggccataagagaggcgaatcaatggcgcgagtgcagaggtcagcaggaacaggaacgcagcctgaccgttcggcgtagcgacggagggcagattggtaccggtattaatggcgaccgccagcagctcgtattgcttcaacgtgatagcgccactttccattgccgctttcgcttcgttgatataaatcgtccccacgaagacgttatcgctaatggaactcagcagaccgttgaaaatatagaacaggctcagctgagcatgttcgcttgcctgcaacacaaactgaataattgggctaaacagttgttggtcgataatcaccgcgactacgctgaaaaacaccgtcaacagtgcggtgaatggcagagattcggtgaaggctttaccgatagcatgctcatcggtgacaccggtcaaacttgttgccagaataatgacactcaaaccaatcaagccaacttccgccagatgcaacgccagcgcagtcaccagccagacgccaataatcgcctggacaatcagacggattttatcctgacgggtacgctggtggcggctttgatcgtcaaactgttgcaacacttcgcggactttctccggcagcgtttcaccgtagccaaaccaacgcagcttctctaccagcaggcaggttaacaggccacaaatcagaaccggaacggtcaccgggctcatgcgcaggaagaaatcgccaaaatgccagccagccgctttagcgatgatcaggttctgtggttcgcccaccatggtcattacgccgcctaatgcggtgccgacaccggcatgcatcatcaggctacgcagaaagccacggaactgttccagaaccactttgtaatgcttgtcgatatgactatcgtcttgcaggtcggtgtcttcggtacgggaagaggctacgcggtgataaataccataaaaaccgactgcaacgctgatcaccaccgccacgacggttaaggcatcgaggaacgcggagaggaacgcagccgccacgcaaaaagagaggctcagcagcattttggagcgaatgcttaacagcaaacgggtaaatatgaacagcaacagctgtttcataaaatagatacccgccaccataaacatcagtaacagcaagacttcaagatttgccgccacctcttcacggacgtgttccgcgctggtcatgccgatgaataccgcttcgatagccaacagaccaccggggagcagcgggtagcatttcagggccatcgccagagtgaaaataaattccgctaccagcaaccagcccgcgacgaaagggctgatgaggaaaattaacgggtttacgattaagaaaatgatgagggcgagtttgtaccagtcgggggactggcccaaaaaattgcgccatagcgcgcggccccaggagatctccatgatggtttcccttaccttacaaataatcaatgatgtttttatgtttaaacgcaaagcttaacggtcaggcaggagtgaggcaagtcttgatagtcaaggggaaagagatgcggaaaatgaagccttgatccctttttcttctttttgtctgctatcagcgtagttagccctctggtatgatgagtccaactttgttttgctgtgttatggaaatctcactatggtcattaaggcgcaaagcccggcgggtttcgcggaagagtacattattgaaagtatctggaataaccgcttccctcccgggactattttgcccgcagaacgtgaacttagtgaattaattggcgtaacgcgtactacgttacgtgaagtgttacagcgtctggcacgagatggctggttgaccattcaacatggcaagccgacgaaggtgaataatttctgggaaacttccggtttaaatatccttgaaacactggcgcgactggatcacgaaagtgtgccgcagcttattgataatttgctgagcgtgcgtaccaatatttccactatttttattcgcaccgcgtttcgtcagcatcccgataaagcgcaggaagtgctggctaccgctaatgaagtggccgatcacgccgatgcctttgccgagctggattacaacatattccgcggcctggcgtttgcttccggcaacccgatttacggtctgattcttaacgggatgaaagggctgtatacgcgtattggtcgtcactatttcgccaatccggaagcgcgcagtctggcgctgggcttctaccacaaactgagcgcgttgtgcagtgaaggcgcgcacgatcaggtgtacgaaacagtgcgtcgctatgggcatgagagtggcgagatttggcaccggatgcagaaaaatctgccgggtgatttagccattcaggggcgataatcccttccgtttaaagagcaaacccctcaaacgaggggttttttgttgtttttacagatttcccattcttggcgggcaacgttccagcaactcgatgctgccgtcttcgttttgctgttcgagcatcacatcaaatccccacaggcgatgcacatgcttcaggacttctttgcgcccccgatccagcggtgcgcgattatgtggaatataacgcagcgtcaggctacggtcgccgcgcaaatccacgttccagatctgaatattcggctccagattacttaagttatattggctgcttaaccggttacggatctcccgataaccttcttcattatgaatagcggaaatctccagataattatgccgatcgtcatccagcacggtgaagaagcggaaatcacgcatcactttcggactcaggaactggctgataaaactctcatctttgaaatcacgcatcgcgaaatgcagcgtttccagccagtcggaaccggcgatatccgggaaccagtatttgtcttcttccgttgggctctgacaaatccgtttaatatcctggaacatggcgaacccgagggcatacgggttgatgccgctgtaccacgggctgttataggggggctggaagaccacattggtgtggctgtgcaaaaactccagcataaaacgttccgttactttcccttcatcatacagatggttaaggatggtgtagtgccagaaggtcgcccagccttcgttcatcacctgagtctgtttttgcggataaaaatactggctcaccttacgcacaatacgcaggatttcacgctgccaactttccagcagtggcgcatttttctccataaaatagagcaggttttcttgtggttcggacggatagcggcgcgcttcagcaaccgttttctcttcctcgcgcttcggcagggtacgccagagcatattgacctgactttgcagatactcttcgcgacttttctgccgggctttctcttcttgcaggctgattttttgcgggcgtttgtaccggtccacgccgtagttcatcagcgcgtggcagctgtccagaagccgttctacttcatcaacgccataacgctcttcgcactcggtaatatatttacgggcaaaaatcagataatcgacaatgctactggcgtcggtccagctacggaataagtaattgtttttgaagaaagagttatgcccatagcaggcatgagccatcaccagcgcttgcatggtaatggtgttctcttccatcaggtaagcgatacacgggttagagttaatgacgatttcataggccagtccttgctgaccgtgcttatacagccgttcagtctcgataaactttttaccgaaactccagtgcggatagttaattggcatgccgacgctggagtaggcatccatcatctgttcactggttatcacttcaatctggtgcgggtaggtatccagccggtagagtttcgccacccggtctatctctgccagataaacatccagcaggtcgaacgtccagtcgggtccatcgctcaaacgtgtggtgtccttattcatagaatcgatcgtcgccatacgcgcacctcattgttgtcggcgctctctgtgtggagcacctcatttcaagcatagaacacctgttaaaaaccgcgtcgccggagaatttttttctttgcgatttcttattatcagagtgccactaatccgcttctgaacggaattttatgctggataaaaagggcgttcagcaggagatactaaagacgccatattgccgcagagtcagggagatgtgagccagctcaccataaaaaagccgcatgttgaataatattttcaactgagttatcaagatgtgattagattattattcttttactgtatctaccgttatcggagtggctatgcgagttgtcatactgggaagtggtgtggtaggcgttgccagcgcctggtacttaaatcaggcaggacatgaggtcaccgtcattgatcgggagccgggggccgccctggaaaccagtgccgcgaatgccgggcaaatctcccccggatatgctgcaccgtgggcggcaccaggtgtgcctttaaaagcgattaaatggatgttccagcgccatgcgccgctggcggttcgtctcgacggtacgcagttccagttgaaatggatgtggcaaatgttacgtaactgcgacaccagccactacatggaaaacaaagggcggatggtgcgtctggcggaatacagccgtgattgcctgaaagcattgcgcgccgaaaccaatattcagtatgaagggcgtcagggtgggacgctgcaactgttccgtaccgaacaacagtatgaaaatgcgacccgcgatatcgccgtgctggaagatgccggcgtaccgtatcagctgctggaatccagccgcctggcggaagtggagcccgcgctggcagaagtggcgcacaaactgacgggcggcctgcagttacccaatgatgaaaccggagactgtcagctatttacccagaatctggcgcggatggcggagcaggcgggggttaaattccgctttaatacgcccgttgaccaactgctttgcgacggcgagcaaatctacggcgtgaagtgtggcgatgaagtgattaaggccgatgcgtatgtgatggcgtttggttcttacagcacggcgatgctcaaaggcattgttgatattccggtgtatccgctgaaaggctacagcctgaccattccaattgcgcaggaagatggtgcgccggtatccaccattcttgatgaaacctacaaaatcgccattacccgtttcgataaccgcattcgtgttggcggaatggcggagattgttggttttaataccgagctgttgcaaccgcgtcgtgaaacgctggagatggtggttcgcgatctctatccacgcggcggtcatgtcgagcaggcgactttctggactggtctgcgcccgatgacgccagacggcacgccggttgtcgggcgtacacgctttaaaaatctgtggctgaataccggtcacggcacgctcggctggacgatggcttgcggttccggtcagttgttaagcgatctgctctctggtcgcacgccagcgatcccatatgaggatctaagcgtagcgcgctacagccgtggatttacgccaagtcgtccgggccatttacatggcgcacacagctaaggaaacgagatgacccgtccgatacaggccagcctcgatctgcaggcattaaaacagaatctgtccattgtccgccaggccgcgacgcacgcgcgcgtctggagcgtggtaaaagcgaacgcttacgggcatggtattgagcgtatctggagcgcgatcggggccaccgatggctttgcattgcttaacctggaagaggcaataacgttacgtgagcgcggctggaaaggaccgatcctgatgctggaaggatttttccatgctcaggatctggagatttatgaccagcaccgcctgaccacctgcgtacacagcaactggcagctcaaagcactgcaaaatgcgcggctaaaagcaccgttggatatttatcttaaagtgaacagtgggatgaatcggttgggcttccagcccgatcgcgtgcttaccgtctggcagcagttgcgggcaatggcgaatgttggcgaaatgaccctgatgagccattttgccgaagcggaacatcctgatggaatttccggcgcgatggcgcgtattgagcaggcggcggaggggctggagtgtcggcgtagcttgtccaatagcgcggcgactctgtggcacccggaagcgcattttgactgggttcggcctggcattattttgtatggcgctagcccgtccggtcagtggcgtgatatcgccaataccggattacgtccggtgatgacgctaagcagtgagattattggtgtccagacgctaaaagcgggcgagcgtgtgggctacggcggtcgctatactgcgcgcgatgaacagcgaatcggcattgtcgccgcagggtacgccgacggttatccgcgccacgcgcctaccggtacccctgttttagtggacggcgtgcgcaccatgacggtggggaccgtcagcatggatatgctagcggtcgatttaacgccttgcccgcaggcgggtattggtacgccggttgagctgtggggcaaggagatcaaaattgatgatgtcgccgccgctgccggaacggtgggctatgagttgatgtgcgcgctggcgctacgcgtcccggttgtgacggtgtaacttgttgtaagccggatcggaggcaacgtcttctgggtgcaaaaaaatcatccatccggctggtcagcaactgtagttgttaatgtgacagagccattgcccatgatagtgtccattaaaaggatggacactatttccccggaacctgaactcaccgcacaggcgttctacataaaacgcttacgcttcattgttgactcgaactcgacttcagataaatcacgctttacccttgatggagcctgtacatagatttgtgtaattgcctgattttgatatgttcaattcaacatcaaatgaaggttaaattatggacgacaaacaattgcaggctcaggctgcgttcagcaaagcatcgcaaccggcgatagatgcttcattaaatttaagattcagcttcctcttcagccacccgtacgccaatcttcaacacttcattatcttctttctcggccaccgtccagatcatcccggcaaactctacctggtcaccgacaaccggtgccgcgcctaacaactgctggacaatttcacccagcgtttgctgcttatcacgatattctcgcccgtcttccaggccatatatcagcgcaacatcagcatatttggcgctggcttcgagaatgaagtcaccaaagaagcgttgatccagcgcgaccggcgggctctggctgaacagtttaccgagcgccggaagatcgcgttcccgaccaattacacacaacacatcgccttcgcgcagtcgggtgctgccggtaggatgaagcaactggttatcacgaaacagtgccgcaatacgcgtctcttttggcatatgcaaatcgcgcagtgccgcgcccacgcaccatttatcggcactcaattgataaacaaactgctcccacggattttccggatgaatatccaggccaacgcgactcaccggacgtcccactggcggaaccaccactttggcttttttagccgcccagctgagacttgttccctgcaagagcagactaaccagaaccacaaagaaggcgacattaaagaacagacgtgcattctccagccccgccatcatcgggaacacggccaggatgattggcaccgcgccgcgtaatcctacccagctgataaacacgcgctcacgcagattgaaaccgcggaaggggagcaatccagcaaatacgctaaggggacgggcgaagaatatcatccatgcggacaaaatgagcgccggaatggcaataggcagcagatcgcttgggttaaccaacagccccagcaccaggaacatggcgatttgcgccagccaggcgaggccgtcgaaattttgcaggatgccgtagcggttgcgaatagggcgattacccagcagaaaaccgcacagatacaccgccagaataccgctaccttccagcgcagtagttaaactgaaaatcagaataccgccacttaatgccagcaatggatataatccggcgggcagggcgatgcggttgatcatttgcagtagtaaataaccgccgccaagacctattacaatgcccagaccaaattgttgcagaatatcgacaatgaacatccagctaatattgctctcatgatgctggatcatcgcaattagggtaatcgtcagaaagaccgccattggatcattactgccggattcaatttccagcgtgctgccaacacgttcgttaagccccttaccacccagcagagaaaagaccgctgcagcatcggtagagccgacgatagcgccgattaataagccttcaatcaaatcaagattaaacagccacgccgccatcatgccggttaaaccagaggtgataagcacgcccagcgtcgccaggctcagtgccggtcctaacgccacacgaaaggaactggcctgagtgcgcatcccgccgtcgagcaaaataatcgccagtgccaggttacttaccatgtaggcgaaggggtaattatcaaacgggataccgccgacgccatcgactcctgccagcatgccgatcgccagaaaaataaccagaataggaatgccaagacgggaagaaaaactactaagtaatatactgctggtgacaaggatggatcctaagatgaaaaggctaattattgttgtggcatccaacggtcggttactcctgattacgctgtctcttatataaaccctaccatattagcggcagagacagcgttttacttagccctgaagcgtgatttttttacattttaagaacaggatgaccgctaatcgtcaactgagtgccttcccgggtgttattcagaatggcatgtgcgcccaacggcagcgtaaccgtgcgttgttcatgaccaaaatcgaggccggtaatgagtggaatgctcaggcgggaacgcaaaaacgcgtacacactctccaggttgtaacctgcgtcataatcattgggcgtgctgccgctaaagctaccgagaataatcgccttctgacgtggcaaaattcccgcatgatagagctgcaacagcatacgttcgacccggaaagggtgctcgttaatatcttccagcaccagaataccgttctcaatttttggcatccacggtgtaccgatcagactaatcagcatcgcaagattgcctccccacaacgtgccttcggcccgacatgtcgggccttccccttgccattcaatggtgaaggtttcattgcgtaacgccagccagaaatggtgctcggtaaaggcgttcagttcatccgcgccaaagtttgctaccagcatggggccgctaaaggtgatgacattgccatgcgccagaagaccgcactgaatggcggtaaaatcgctatgtccgcaaatgagcaacgggtcatgttgttggcgagccaccagtgcctgccagtcaatatctgccagtaaacgactggcaccgtaaccgccgcgtacagccagcacgatggtgttgggggtagtcagtctggcaagggaattgagatcttccagacgctctgtttccgtacccgcaaaacgctcacaacgacgggcaataacctcgacgttattgacttgatgccccgcgtcggtaaggcgctggataccacgcagcgcggcgtgctgtttaatgcagtaaccgcttggggcaattaagtgaaacagagacatggcaattccttgctgacaacagaaacgaaatgtatatcatgccgcttaggtgtgccgttgtcacctcaacggcgattccaggctataaggatagaagaagtgaaattgagatggtttgcctttttgattgtgttattagcgggttgtagtagtaagcatgactatacgaacccgccgtggaacgcgaaagttccggtgcaacgtgcgatgcagtggatgccaataagccagaaagccggtgcagcctggggcgtcgatccacaattgatcacggcgattatcgctatcgaaagcggtggtaatccgaacgcggtgagtaaaagcaatgccattggtttgatgcagttaaaagctagtacctccggacgtgatgtttatcgccgtatgggctggagtggtgagccgacgaccagcgagctgaaaaatccagagcgtaatattagtatgggggcggcttacctgaatattctggaaaccggcccgctggcaggcattgaagatccgaaggtactgcaatatgcgctggtggtgagttacgctaacggggcaggtgcgctgctacggactttcagcagtgatcggaaaaaggcgatcagcaaaatcaacgatttggatgctgacgagttcctcgaacacgtagcgcgaaatcaccctgcgccgcaggctccgcgctatatctacaaacttgagcaggcactggacgcgatgtaaatcagtcgcgcactttgtccgctttttcccgggcttctcgctcgagagagaaaataatccgctgtaattgccgctccaccgtcgggctgacgttaagaaaacggaagctcagacggggagtggtgatggtttcattcttgccatcaatcactttgcgctcgctgatggagattaactgggcgtcaaagtgaaaaacaccccattgccccatgttgacttcaatctgagcgaagcgcatgccttcttgtaattcggcaggctttgctgtttccagtaatgcgcccatgccgcctaagctcaaatcatacaggcggaaacgtaacgtactgttatccgccagtttggtctggcaaaaataaggcggatggagtggggcggagatgcggaaatatcggcgtcgttgtacaaaccataaggtgggaggcggtacggtaataaatgccggaagctgcaagtattcactctgctgtagttgttcaacagtaaactcgactttcgcaccctgagtttcggcggtaatggtaatgtgctgtgcctttagcacggcgatgttgtcttcggcttgactgccgaaatccagcaccagtttatccggggttattgccagtaatttgctgatcagctgcccgccattccaactgagacgcaaaggaattgcggctttgtgcaaatcgcgtaacacgcccaggacggctaacggattttgtttcaggaactgctcatggtaatgactcacgcggaaaaactcctgactgacaaactgtctttggtttatcggtcacagttaacaaaacttaatacaaatgcgtgaatattttttacatgttgttcttaaatcagccgacatacgcccagcatcgatcccgcccttgcctatacttagagcgttgatgtaagcatttcttgcgtccgattcatcgaaacgagggcctgaacatgggaattattgcctggattatttttgacctgatagccggcattatcgccaagctaatcatgccggggcgtgatggtggtggatttttcctgacctgtattctcgggatagtcggtgcggtggtcggcggctggctggcgaccatgtttggcattggcggctccatcagtggttttaatctgcacagcttcctggtggcggtggtgggagctattctcgttctgggcatattccgcctcctgcgaagagaataagattttcataaggcggatagcgatacagatgccgctatccgctttcacatcagaacgtatactcgacacctgctttacgggtgaaaaaaatcaatatagcacttcgatatccgataaagtcggttcccggtaacaacaacagaatccttttttaattattgtttcgttgtttttggtgtgattcagaaaataaatattttagacagtagccagagtggcgttaaaaatggggcggatagtgaggcggttttggctgcgcttattgaacatttagaattgatcaatccttctggcagattaagccaaaatacccgtagcgcaatgcttcagttacgcgaagaggaatggtctgaattctttttttggttgctaaattctctggagtgtctggattatgtgattattaatttaactccagaaagcaaaaaaacgttgatgagtgaacaccgtaacaatattcaggtagcaattgatgctttatatagccaacgtcggcgtaaaagcccgggtgatgaaagtgaaacacttacccgtagaaatgacgctatcttcggcaaccacgtatggcaaacatttgcgcaatacttcccgccaggacttgaaaaaccgtctgtgtaaaaaaaaccatagctatggtgttatctgccgacaacgccatccggagaagccgaatgacgttgtcggagtaagcgctggttaaggtgtgggttgtgcctctttggtactgggttgcgtcgttgcactcttaacggtcggacgcgtcgccggaacattgtcacacggttgctctttcgggcagatcaaatccagcattttcagcgtcacgccattggtccagccaaagccatcctgtaatggatattcgccaccgccgccccccgttccggtggtgctgacatcatatttttccaccagctttttctcccggtcataggtgtgctgaacattggtcaggaagtgccagctaatgtccatcgccacctctttttgcccgtagttttgtaatccttctgtcgcgacccactgtaacggtgcccagccatttggcgcatcccattgttgcccacttttcacgctcgtggtgttcaggccgccgggttgcagcagatgtgttttcgtcgccgtcgccattttgttggcgcgatctttcgctgccgcattgacgtacagcgggaacagggcggccgcggttaactgattgcgcactttatgacttttcaggtcgtaatcggcataccagccttgttgatcgttccacaggtatttttcgatccctttttgacgggcatttgccagcgtttcgtactggtttgccatcgcgttatctccggcagctttgctggcgcgggcgaggattttttccattttaaacatcaggctgttcagatcgaccggtacgatgctggtggtgcgtaaggtatttaactgctgcgggttgtccatccagcggctgctgaaatcccagccagacgcagcggcagagcgcaggtcgcggtaaatttcagtggcaggtcgattcggattgcttttggcggtggcaatatcttccacccaactctctggtcgtggcgtatcgcgatcgtcccagtagcggttgagaagggtaccatcctgaagtttgacaacgcgtttttcctgttgtccggcttgcaggttttcaacaccgtccatccagtaagcatattctttttgcatttgcggcaggtattgcttcaacgcggcatcgccttcatgctgcgccagtaactctaccatcagggcaaagaagggcggttggctgcggcttaaatagtaactgcggttgccgttgggaatatgaccgtaagtgtctatttcatgagcaaaattggccaccatatccgcgactttatcccagtgaccgctttcggcaagtcctaacatggtgaagtaactgtcccagtaatatacctcgcgaaagcgtccgcccggcacgacataaggttccggcagcggtaacagagaatcccatttttcggtgttttcggtagaacgcgttaataccggccaaagtccgtcaatatgttcgcgcagactctgcccctctggcggaacatatttctcgccttctttcggcagggtgaaattgacgttaacgaaatggcgcagatcaaatccgctctggttttgctgcatccgataatcagcaaggatcatcagcggatcgctgttcggcacggcatcggcaaaggttttttggtccggaaaaagtttggcgttttgcacatcattaaacagcggccctaataaaatatcaggcggctgtggtgttaccggtgtttcttctgcctgcacgcttagcgcagcgaaacacaaaaagatacaggctggaattaacgccattttttgcgggcgagaaggtgcgggggatttcatcaatcattctcctttggcgaaaccgaataaaacggtattcaagtatcagaaaaccttagttcaggatcgcactagctgcatgatcgaaatctcattctgcgaactgtcaggcattttagaaaagggaattaaagggataaataacggcgaaatagagtgatcaaataacgtctgtttattagccagccagcggcgttgggttcgtgattagcgaagaaaaatcatcataaattggtgaaaaatataacaggtagttaaaaaccattagtgctgagtaaattgccggatgacatcagaacgatgccatccgaacagtggcttaaccctgacggttgaaacgttgcgttttaacgtccagcgttagcgtttcttctggttgtatcgcatacagtttctcaccctgctggcaaatccagccaatccccagttcacgggcgattagggcgctgtgggataccggacttccggcgctaaggcagataccttttacaaccgccggatccagttgcagtactgtggaaggataaatgttctccgccagtagaatagttgggctgttaaactgcgggagttcttctttcgtttgggtcaggtggaccagggtgcgatgcagaagatcgtccacatcaatatagcgagcttgtagatattcatcatccagttgctggtattgctggctaagttctttaagaacttgctgccaggcatattctgccgtgcaatgttcatgctgaaggagttcgcttgccgccgccagcagttccggatcatctaacagtgtatggtgaccagaaaagattgcggcaatatcgtcaagcccgctggcttctgctttcgctgttaacgtcatcagatctaataacgtgaagtcaatagcctggcgtaatcgatcttgttcttcttccacggtcagggtactttttgcctgtaccgtacataaaactggttgataataaaaggctttaccgctaacaggcggaacgggacgcagagtaggtggagcgacttcctccgtttcaccaaagttatcttcagccagctgacggaaagcgatcagtgcctcttcagcttctggccctttcgcaatcaggcgcagcgtatcgttatagcgaacttgtagtaacgcaatctggttaatactctctggtgtgacgcatttgccgtttttttccagcaacatatcggcattaaatgtgcttaaggtataaaccagccgggaggccggacgtacatgcaggccgttacggttttttatgaccaccgccagagaacgggcttcttcatcgtacgcaggacatgtgtcagagatttcagtgtcggaggacggtaaacccagttgttcacgtttggcttccagcgcatgcatggcgtcaaagataactttgtcgatatccgccccgctggccgcgctgaccgttgctgccagtgtaccttcgaccaacggcgcagcacacaaacgtacttttgcggcgatctcgggagccagcaattccagcgcagtttcagcactcaataatgcgctacccatatccatcatgaccagcacatggtcggcatcagcaacagattcgatggcctccatcactttgacggcatcggtaccaatgggattttgtggatcgtcaattcccgcggcaatggcgattttacaactatcactcattaacatctgacgggctaattcaccgacaccttctcccagtcggctgctatgactaactatgaccaggtttaccatcaccaattccttactcttttgcggctaacgccaacatttgcatcataaacatcacgctggtcgcgccgggatcctggtgaccaatactgcgttcaccgagataactggcgcggcctttgcgggcttgcatcgtaatcgtactttgtgcagcggattcggcgatgctactggcagcttcgagcgccaccggaacagagagattttgctcgctggactgacgtaagctttccaccaccggcacccacacatcacacatggttttatcgccaggttcggctttcccgcgactgattacgccgtccgcgccatcgcggaacatctgataaagctcttccagtgtcaggctttgccgtgcctgggtcgcctgtgcggcgcggataaagaaggtaccgaacagcggaccactggcaccaccgacgctggaaagcagcgtcataccggtattcttgagaatgaaaccgatatctttatctgcgatagcagggagtttttccaccactttgctaaagcctcggttcatatttagcccgtggtcagcatcgccaatttcgcgatccagtccggtaagatactcgctctcggtgctgaaaatatcgccacaacgagtgagccagttaacaatttgagttctgctcagactcattgctttctccttatttaccccagttaagggccggggtgtggaccggggcgtcccagagtgccagcgtttcgtcatcaactttcagtaaggtgatactgaaaccggtcatatccagactggtgcagtacgcgccaattaaattacgttcgatagtcaatcccgcttgctggcaacgtgtggtcaggcggttatagacgccgtacagctcagaaagcggagttgcgccaagattgttaaccagcgcaatcacccgatcgccagactggagcggttgtttggtttgttgttcttcctgccaactgccttgttgataatcccagaaacgcaaagtgcgatggtaactgccatttaccagcagggtgtcgaacatttcatcgacggtttgatcaagggaagagaaggggcggcggtcaatacccggctcaccatgaatgccgacgccaaactccatctcattatccgccagggtaaaagaaggtttgcccgcggcaggaacggtacaggcaccgagagcgatacctatactgtggccttgattattcagcttacgccccagttccgcacaggcgtccagactgtcgccacgctccgccgctgcgcctacgagtttttcaattaatacggtgttggcaacgccgcgtcgcccggcagtataaagactgtcttttaccgcaacgtcgtcatcaatgaccacagtggtcacttttacgccgctatcgtgcagtaactcggtcgctgtttcaaagttaagaatatcgccggtgtaatttttgataatcaacagtacaccttcgccgccatcaacttgcatggcgcattcaaagattttatcgggcgtcggactggtgaaaatttcgcccggacaggccccgctaagcatcccctgaccgatataaccacagtgcatcggctcgtgtccgctgccgccaccgctcagcagggcgacttttcctgcaacaggggcatcagctcgggtgacatacaccggatcctgatgcagtgtcaggcttggatgcgctttcgccagtcctgccagttgttcgtccagtacgtcttgcacatcattgatcaattttttcattattttgctccagcaattacggtagggcatggatgatgttcaacgacacggcgaccactgactgccgatgaatccattgtgcatcaggcaagggaaaagaaaattagcccaaattatgtttcatagtgaaacatatgctttaatgaatgttccatattgaaacttttacgtgtattaatacttaaaattgcgagccggaacaccttttgtcataagggatgcgggatatgagtggcgcttttaacaacgatggtcggggcatatctcccttaattgcaacctcctgggagcgatgcaataagctgatgaaacgggagacatggaacgtaccacatcaggcccagggcgtgacatttgcttctatttatcggcgtaagaaagcgatgctgacgctcgggcaggctgcgctggaagatgcctgggaatatatggcaccgcgagagtgtgcgctgtttatcctcgatgaaaccgcctgcattctcagccgtaatggcgatccgcaaaccttgcagcagctaagtgcactgggattcaatgacggcacgtattgcgccgagggaattattggtacttgtgcgctaagcttagcggctatctctggtcaggccgtgaaaacgatggccgatcaacatttcaaacaggtactctggaactgggccttttgtgcaacgccgttgtttgacagcaagggccgattgacgggaacaatagcgctggcgtgtccggttgagcaaactaccgcagctgatttgccgttgacgttggcaatcgcccgcgaggtcggaaatttactgctgacggacagtttgctcgctgaaactaaccgtcatttaaatcaacttaatgccctgttagaaagtatggatgatggcgtgattagctgggacgagcagggtaatttgcaatttattaatgcccaggcggcgcgggtcttgcgccttgacgcgacggcaagtcagggacgggcaatcactgaactcttaacgttacccgccgtattgcaacaagcaataaaacaggcacatccgctcaaacacgtagaagcaacctttgaaagccagcaccagtttattgatgcggtgataacccttaaaccgataatagaaacgcagggaaccagctttattttgttgctccatcctgtggaacagatgcggcagttgatgaccagtcaattaggaaaagtcagccataccttcgctcatatgccacaggacgatccgcaaacccgccgcttgattcattttggtcgccaggcggcgcgcagtagctttcctgtcctgctttgtggagaagagggcgtgggcaaggcactgctaagtcaggcaattcataatgaaagcgagcgtgctgcaggtccttatatcgccgtcaattgtgagttatatggtgatgctgcgctggcggaagaatttattggtggcgatcgcacggacaatgaaaatggccgtctgagtcggctggaactggcacacggcggcacgctgtttcttgaaaagattgaatatctggcggtggagttacagtctgctttgcttcaggttatcaagcagggggttatcacgcgactggatgcgcggcgtttaataccaattgatgtcaaagtgattgcaacaacgaccgcggacctcgcaatgctggtggaacaaaatcgttttagtcgccagctgtattacgcgctgcatgcatttgaaattaccatcccgcctctgcgtatgcggcgtggcagcattccggcgctggtgaataacaaattacgcagtcttgaaaaacgcttctctacgcggctgaaaattgatgacgatgccctcgctcgcctggtttcttgtgcatggccaggcaacgattttgaactttacagcgtcatcgagaatcttgctctgagtagtgataacgggcgcattcgcgtcagtgatttgccggaacatctgtttaccgagcaggcgacagatgatgtcagcgccacccgcctttccaccagtctgagttttgcggaagttgaaaaagaggcaattattaacgcagcccaggtcacaggcggtcgcattcaggaaatgagcgctttacttgggatcggccgcactacgctgtggcggaaaatgaagcaacatggcattgatgcagggcagtttaagcgccgggtatgaaagacagaaacgatttctgatacatcagagtgatctgtatttcattccggcgcacgctaacaattttcagcatcgtttaagggcttgtctatcccgcacttaaaagctgaagcgatatcctccgttgacttgcttctgatcaaagaggttaccctgcgtgtaatccgcttcgagatagaatgtgtgctgtttgttatactgtgcactgactcccacgccgttattccagccattacctttgaaactgtacttctcccgggagttgttcaacagatattcggtatccccactaaactcgcggatagcgccagtcttcacatagacattcagctggctgttgcctgcggtgatgtcataccccagtatcatgctggcacgccccagcaggctttcgtagtgattcagatgtatattgaggccattactcgccttcatagtcatctcattctggtggctgtatgtaagctgggtttgcggctctatatagaacccataaccagtaggggacaggttgaacctctgcccggcttccagggagatgctcattccattcgcagtgccgttggcgttaacgccgttgttctgactgtccagtacgtggaaactatttttctggcggcttgcttttataacgagatcgctgtaaaaaccgttttgtgccatgtaactggcgtacattcccatgtagtcactacgtgcggtaccgtcgcctccgctatagtccgggcttgcatgtgtactgccaatatacagaccgacatacaacggcattacatcagagagacgtttatccccaccaaactggataccgctgtaacccatgtcaaagccgctcagtttgccactggcaaaggagtccaggcttcccccataactgcgcaaccagatattaccgtctttactctgatttcgcaggtcacccatccgttgcatcagcgtacggttttcaacatagttcaataagtaaccgacattgagataattgccgccagcatctgcggtcgtggtgggtttaggcgtgggagcgggttcaggcgtaggatcggggttgactatgggaggctgagcgggagctggtgtgggttcaggattaggagtcggttccggaactgtcccggaagcgtaaagctcccagttagtgccatttttacgcacatcgtacagatatccccccaactcaacctgagaagacgcgctgaagctggccgcgccgtcagtggtttttaccactgtcagaacttcatttcccgttgtggcctcgctgccctggttgcggatagccaatacgtgattaccagcactactcccgctgatattcaataaatcccctttattattaacgccattaccctcgccaacaacatcagcacgcataataaaggtactgttaccgctcaggttctctacgtttaatgtggcaaatgtgccggcagtactcccgtggctggcaaaatcgacagtactatggctcagcgccagcgtgtcgagattagaattacttgttacgttccagacgctgttattcattgcaacgtccagttttccgccattgacattatcgctgagggaggaacctgtccaaacgttcccagggtgcatatccagattgattagcccacctttggaaagaacgctaccgttgataagcatacgaccgctggcgttgatgcggctggcggcataaccatcgtcatgttgcgttgcgatggccatctggtcgggtgtactcatatcaatgaccagatcgctcgtgaggtcgatctggctgttggtcatggcataaattcccctggctcctgccgcgccggtgatagccaaactgtctccggttattctaccgccgctgagagcccacaaacccagcgccagactgccattacgatcaactgtaatatcggtattttgcatgttgacaacagccgttgccgtctgggcgctggcaccataagaaccgccggaaaagatgctgtttcgttgcgctgccgtgccagtaaaattgattatcgcgtcactaccactggtgacgaggccaccgccctgcgcggaagaaatatggctatctgcaccgatagtggttgtaccaccacgaacttcgacgccattggccgcggctccagttacatcaacagtgagtgcattcgcgctaacctggccaaagctccagaggccgtgagcattatcgccattggttttaatggtactgtttgttccgagatcgacaacagagtttttctgtacgtttatccccatggcgctgtagccctgaacatcgattgtcaggtctgtagccgtaaaacgcgcagcaccattggcgttattgccgttgagaccaccgatataaacacctgtacttccatcggtcgtgattttacttccgcttccaagatcgacactggtgccatagtcattgatggttaggcctataccgttgctgttttcaatggtgaattgagtggctgttagtgtactgctatgcccaataatgatgccgtcatcgttactcttaatggtgctgcctgtgcctaagtcagcatgggtatagtcaccaattaagttaatgccgatggcagaggtttgaccaacaacatctactgtgagtcggttagctgtcagggagctgtttttgccctgaataatgattccttttgcatatccagaggcgtcgttgacattgacggtgacatcattacccaggttgatattgccaggcgtgtttcctgctggggtcattacaccatagaggtttccacttggatcggcggtatctcctgtaattctgtcaccatcattaatagtaatattggtgccatattgacttcctgtatcagcagctatcagcaggggggaaaagataattgcattcaaaccaatagcgccaaattttatcagttgaatactggggctacggatttttaattcagcgagacgatctgctttggtattcccattgtgttgtttgatgcccataccactcctatatagtacccagactatgggtctatggattttgtcattttgtttaaatcaatgaataatatcctcttatcatcatgatatttgtatggtgcaatcatgatgagcttctcagagaataattctctattaccgggcaaaatcaggaacacaggaattaatatatatttaacatcccccttacaaaggtgagtttatatcgagttattccctaagttgtcgttacttattccaattcgttactataaatatggcaaaaatattacaacaaacagcggttaaaaaatttggtgaagattttttgtaataatcctaattagttatgggaatttcgcttgatgtatctgcataacaaaaacaatatgcgccatttttgcattactaataagaaaaagcaaaaaacatcgatattcatttttggtcaatgggttttctggcctatcgttgttattgtgctactggttatcattttcatcttgccagcatattggagcgtgatcaattttgatcagctgtgaagggggctgatgtgtagtgatacaaaaacttacgttatatcactgctaatgagatatccggcatctgaacacttatgtctttaattattctcgtggttcactataggcaataagcacaaaagtgtaggatgttacaagaatgattaggactcggtgaaatgaaaaatccacgcaattgcgtggattttatatacttttgcgctcttcatgagatttagcgaaacctcatgagacaataaattaattagacgttgaaaaggaagttcatcacatcgccatctttcacgatgtaatctttaccttctgcacgcattttgcctgcttctttcgcgccttgttcacctttgtaagtgatgaaatcttcaaagctgatggtttgtgcacggataaagcctttttcaaaatcagtatggattttgcccgctgcctgcggcgcggttgctccaaccggaatggtccatgcacgcacttctttcaccccagcggtgaagtaagtttgcaggttcagcagtttataaccggcacggatcacacggttcaggcccggctcttccagcccaagctcctgcataaactcgtcacgttcttcgtcgtccagttcggcaatgtctgcttcaacagcagcacaaaccggaaccacaacagaaccttctttcgccgcgatttcacgcacctggtcaagatatgggttgttttcaaaaccgtcttcgttgacgttggcgatgtacattgttggtttcagcgtcaggaagctcaggtaacgaatagccgctttctcttcagcgcttaaatccagcgcgcgcagcatacctgcattttccaactggggcaggcatttttccaggaccgccagctcagctttcgcgtctttatcgccacctttggctttcttctgtacgcgatgaatcgcacgttcgcaggtgtcgaggtctgccagcgccagttcggtgttgataacttcaatatcgtcagccgggttaactttgccggaaacgtgaatgatgttgtcattttcaaagcagcgaacaacgtgaccgatcgcttcggtttcacggatgttggtcaggaactggttacccagaccttcgcctttgcttgcgccttttaccagaccggcgatatcgacaaattccatggtcgtgggaagcgtacgctgcggttttacgatttcagccagttgatccaggcgaggatcaggcattggtacgacgcctgtgttcggctcaatggtgcagaatggaaagttggccgcttcaataccggctttggtcagcgcgttgaacagggtagatttcccgacgttgggcaaaccgacgataccgcatttgaatcccatgatttaaatcaccttaatatcttaataatcaacctgttattgctaacagattgcagaaatggaaataactttgcctattatacacggcactcggcaaaaatgccgcagacaacgacttattgcgctttaaaggcgtgcaatcggttcgttgctttggtcaagccatctgtaaaccacatttcagtacaacgcgccgcttcgtcaatggcttcatcaattaacttctgttcactaacaggcggtttgcctaacacaaaaccgacaactttatttttatcgcccggatgaccgattccgatgcgtaaacggtgaaagttagggttattacccaatttactgatgatgtctttcagtccattgtgaccaccatggccaccgcccaatttaaatttggcgacgccaggaggcagatccagttcgtcgtgggccaccagaatttcgtccggattaatgcggaaaaaactggccatcgccgcaacggctttgccgctgagattcataaatgtagtcgggactaacaggcggacatcttcgcctccaagagtgactcggctagtataaccaaagaatttagcctcttcgcgcagcggagcgcgcaaacgctctgccagtaagtcaacgaaccaggtaccagcattatgtcgcgttgcggcgtattcagcaccggggttcgccaggccgacaatcaatttaatcgtcacgtttttttgtcctgagtgtgtacataactggcgcgtagtttactggttgcggccccgcttgacaaaaaactgcgtatcaaatgcagataacgtaataattgcctgagtggactattagaaagtcaaggtgttcaggcgtttatttgtaaagttttgttgaaataagggttgtaattgtgatcacgcccgcacataacccactgggtgttgtctatactttacacataaggaagaggggtattccctgttacaacccagaaagttccggaggtgacatatgaaacgcaaaaacgctagcttactcggtaacgtgctcatggggttgggtctggtggtaatggtggtcggcgtggggtatagtatcctcaaccagttaccacagtttaatatgccccagtatttcgcacatggtgcagtgctaagtattttcgtcggtgccattctctggctggcgggtgcccgtgttggcgggcatgaacaggtgtgcgaccgttactggtgggttcgccactatgacaaacgttgccgccgtagcgataatcgccgtcatagctaacaaataatgcagtttgctgaccagtcagtttgcgctgactggtcaatctcgtacttataaatccgccatcgccgcgcgacgattcgggaagaacgccaggcgtcccgggatcggttgaatgccagcgcgagccatagtgcgcagtggctggaattccacgttgcacacgcgcagttcacatccctcgggcagacgcttcacaaaacgctggaacgcatcaagaccaccagcatcaagtaccggaacggcatcccacttcagaatcacaatccgtttgccttcaagacgactctccaggtccgtgaataagccttcagcagcagcaaaaaacagcgggccaataacgcgcagaaccaggacatcgtctggaacatctacgactaccggtgccaggcgagtcatacgtgcgatacgacgcataaacagcaggcttgccagcacgatccccacgctgatggcaataaccatatcaaacaacacggtcaggctcatgcacagcagcatgacgatgatgtcatctttcggcgcatgacgcagcaagtcgaccactttgtgcgcttcactcatgttccacgccaccatcaacagcagggctgccatggcggaaagcggcagccaggagagcagcggtgccagtaccagcagggcaagaataaccagaatagagtggatcaccgcgctgataggggacgttgccccggcacggacgttagcggcagaacgcgcgatggcagctgtagcggtaataccaccaaagaacggagcgataatattccccagtccctgtccaaccagttcgctgttcgccttgtgtttcgtcccggtcataccatccagcaccacggcgcagagcagagattcgattgcgccgagcattgccatactgaatgccgcaggcagcagtgtgcgaatagaatcccaggttagcgtgaattcactattaggcagatcccacggcagcaccagttgcggcagcagttgcggaataccgttaccctgagaaccatcggccaggacgtagtggaattggctaccgatggtagcaacatgtccgccgagcaggttaacaatccccatcaccgcgcaaccagccagcaaggccggaaggtgaccgggtaaacgaatgcccagacgcggccaaaaaacaagaatacctagcgtcacaatgccaatggcagcatcacccacattaatggtcggcagcgccataaataatgcgccgactttttgtagataatgttccgggacatgggccatttgcagaccgagaaaatctttaatctgcatggtaccgatggtgatcccgataccgctggtgaaacctaaggtgacggaaaccggaatatactcaatcaggcgaccaaagcgtgccagacccatcagaatcaaaaagatcccgctcagcaaggtcgcaaccagcagtcctgccagtccaaactgttggctcacgggatagagaattaccacaaatgccgcagtcggaccggaaacgctaaagcgactcccacccgtcagagcaatgacaatccccgcaacagctgcggtatataaaccgtactggggtgccacaccactaccaatagccaacgccatcgccagcgggatagcaataatcccgacggttatcccggcaatcaggtcacgggtaaaccgtgcggcagtatatttttctttccagcaagcgtcgatcagagcgcggaaaggcatcacatgactggaaaatattttgttcacaataatgtttcatccgtgagcgcatcatctgtcaactaaatggcaggtgaaggaggcataggtcatacaaatggatattacagacaaaaaaacccgccgcagcgggtctttgagccgggttcgattagtgttcgaacatggcagagatgctttcttcgttgctgatacgacgaatcgcttcggccagcataccactcagggtcagagtacgcacgttcggcagacttttgatttcatcgctcagcggaatggtatcgcagacaacgacttcatcaattacagagttacgcaggttgttcgccgcgttgccagagaagatcgggtgagtcgcgtacgcaaatacacgtttagcaccacgttctttcagagcttcagcagctttacacagcgtaccgccagtgtcgatcatatcatcgaccagtacgcagtcacgacctgcaacgtcaccgatgatatgcatcacctgactaacgttcgcacgcggacgacgtttgtcgatgattgccatatcggtatcgttcagcagcttagcgatagcgcgggcacgcacaacgccgccgatgtccggagaaaccacaattgggttatccagattcagctgcagcatgtcttccagcaggatcgggctaccaaatacgttatcaaccggaacgtcgaagaaaccctgaatctgttcagcgtgcagatccactgtcagcacacggtcaacaccgacgctggagaggaagtctgcaaccactttcgcagtgattggtacacgagcggaacggacgcgacggtcctggcgcgcatagccaaagtaggggataacagcggtgatacgacctgcggaagcacgacgcagggcatcaaccataacgactaattccatcaggttgtcgttagtaggggcacaagtggactggatgatgaaaatatcaccaccgcgtacattttcattaatttgtacgctgacttcgccatcgctaaagcgacctacagcggcgtcgccgagactagtgtacaggcggttggcaatacgttgtgctagttccggggtggcgttaccagcaaaaagcttcatatcaggcacgagaagaacctcaggcatgcgtccattggtggaaagaatctgccgaaaactgtgcgggccaggcatgatcctttccaggcggtgtattaaagagcgcgatgcaacgtctggaacaaggtgacgttgtcaccgaaactcagcttgcccggcttaaagcatggctctgtgcaatggggaaagattagcgcctttcgccacaaagccattgagccattccggggcttgctctagcacctggcgggcttcagactctgtatcaaattcagcaaagacacaggcccctgtcccagtcaggcggctcggggcgtattctaacagccaggaaagcaccgcatcaacctcgcgaaaacgttttcttgcgataacctcgcaatcattgctgaattcacattttagcaacgtttctatactcctttttggcgtattgcgcgggagttcaggatctttaaaaatcaccggagtcggaatacttacaccagggtgcgccaccagataccacttctctggcggatccaccggcgttagtatttcaccaacgccttcggcaaacgcggcatgcccccgaacaaagacaggaacatctgcgcccagcgtcagccccatttccgccagctcatccatgcttagcccgcattgccagagatgatttaatgccaccaggaccgtcgcggcattggaactaccaccgccgagaccgccgcccatcggcaaacgcttgtcaatgctgatattcgcaccgcttcccgtcggaagacgcccgctgtctgccgcagttttcatcaacaatcgcgctgcgcgaacgatcaggttatcttcatgttccacgccttcaacgggcgttaacagacgaatatccccatcgtcacgaagctcaatgctgatggtgtcgccgtaatcaagaaactgaaacagcgtttgcagcgtgtggtaaccatccgcacgctgaccggtaatgtataaaaacagattaagttttgccggagagggccactgtgtccgcattatttcactatccagttatccatttttaacttgatgcgttgaccaccgtcggtgagttccatattggctggcatcgcaggttgcgttttggtgtcataaccaccataaacaaccttccagtttttgccattctggctgtaggtaatttcgctcaggcggtactggtcgtccagtttgtagtcggttgcatcacccggtaaacctaaaatccactggcgcaagctgttgagcggaattggcattccggtcaatttgccaatcatctcttcggcgtcatcggcggtataacgctgacctttattgtcgactaactgcacgttacccggttgagcattcagctccagttccgtgctgcccaatgggttagtgagcagcagacggtagcgatcctggccggtttgctgccagaaaaagcgggcgtacactttttgttggtcagaaatataagcgaacgcgccgcgagtctgatactgattaagattgcgcacgtcttgctgatgctgacgccattgtgggctatccgggcttttgccaggacctttgggcgtggtaacggaacaggcagtgagcacaagagcagccagcggtagcaggcggataagacgaaaatcgggcaggggcatagtgatgacaagtccttgagatacgttgcagttataacccttaatgctagcgttaccgtccgctatcgtctatgttcaagttgtcttaattgccagaatctaacggctttcggcaattactccaaaagggggcgctctcttttattgatcttacgcatcctgtatgatgcaagcagactaaccctatcaacgttggtattatttcccgcagacatgacccttttagcactcggtatcaaccataaaacggcacctgtaagcctgcgagaacgtgtaagctttagcccggataagctcgatcaggcgcttgacagcctgcttgcgcagccgatggtgcagggcggcgtggtgctgagcacgtgcaaccgcacggaactttatcttagcgttgaagagcaggacaacctgcaagaggcgttaatccgctggctttgcgattatcacaatcttaatgaagaagatctgcgtaaaagcctctactggcatcaggataacgacgcggttagccatttaatgcgtgttgccagcggcctggatagtctggttctgggggagccgcagatcctcggtcaggttaaaaaagcgtttgccgatagccaaaaaggtcatatgaaggccagcgaactggaacgcatgttccagaaatctttctctgtcgcgaaacgcgttcgcactgaaacagatatcggtgccagcgctgtgtctgtcgcttttgcggcttgtacgctggcgcggcagatctttgaaagcctctctacggtcacagtgttgctggtaggcgcgggcgaaactatcgagctggtggcgcgtcatctgcgcgaacacaaagtacagaagatgattatcgccaaccgcactcgcgaacgtgcccaaattctggcagatgaagtcggcgcggaagtgattgccctgagtgatatcgacgaacgtctgcgcgaagccgatatcatcatcagttccaccgccagcccgttaccgattatcgggaaaggcatggtggagcgcgcattaaaaagccgtcgcaaccaaccaatgctgttggtggatattgccgttccgcgcgatgttgagccggaagttggcaaactggcgaatgcttatctttatagcgttgatgatctgcaaagcatcattagccacaacctggcgcagcgtaaagccgcagcggttgaggcggaaactattgtcgctcaggaaaccagcgaatttatggcgtggctgcgagcacaaagcgccagcgaaaccattcgcgagtatcgcagccaggcagagcaagttcgcgatgagttaaccgccaaagcgttagcggcccttgagcagggcggcgacgcgcaagccattatgcaggatctggcatggaaactgactaaccgcttgatccatgcgccaacgaaaagtcttcaacaggccgcccgtgacggggataacgaacgcctgaatattctgcgcgacagcctcgggctggagtaacagtacatcattttctttttttacagggtgcatttacgcctatgaagccttctatcgttgccaaactggaagccctgcatgaacgccatgaagaagttcaggcgttgctgggtgacgcgcaaactatcgccgaccaggaacgttttcgcgcattaagtcgcgaatatgcgcagttaagtgatgttagccgctgttttaccgactggcaacaggttcaggaagatatcgaaaccgcacagatgatgctcgatgatcctgaaatgcgtgagatggcgcaggatgaactgcgcgaagctaaagaaaaaagcgagcaactggaacagcaattacaggttctgttactgccaaaagatcctgatgacgaacgtaacgccttcctcgaagtccgagccggaaccggcggcgacgaagcggcgctgttcgcgggcgatctgttccgtatgtacagccgttatgccgaagcccgccgctggcgggtagaaatcatgagcgccagcgagggtgaacatggtggttataaagagatcatcgccaaaattagcggtgatggtgtgtatggtcgtctgaaatttgaatccggcggtcatcgcgtgcaacgtgttcctgctacggaaagccagggtcgtattcatacttctgcttgtaccgttgcggtaatgccagaactgcctgacgcagaactgccggacatcaacccagcagatttacgcattgatactttccgcagcagtggggcgggtggtcagcacgttaacaccaccgatagcgcaattcgtattactcacttgccgaccgggattgttgttgaatgtcaggacgaacgtagtcaacataaaaacaaagctaaagcactttctgttctcggtgctcgcatccacgctgctgaaatggcaaaacgccaacaggccgaagcgtctacccgtcgtaacctgctggggagtggcgatcgcagcgaccgtaaccgtacttacaacttcccgcaggggcgcgttaccgatcaccgcatcaacctgacgctctaccgcctggatgaagtgatggaaggtaagctggatatgctgattgaaccgattatccaggaacatcaggccgaccaactggcggcgttgtccgagcaggaataatggaatatcaacactggttacgtgaagcaataagccaacttcaggcgagcgaaagcccgcggcgtgatgctgaaatcctgctggagcatgttaccggcagagggcgtacttttattctcgcctttggtgaaacgcagctgactgacgaacaatgtcagcaacttgatgcgctactgacacgtcgtcgcgatggtgaacccattgctcatttaaccggggtgcgagaattctggagcttgccgttatttgttagcccagcgaccttaattccgcgcccggatacggagtgtctggtggagcaggcactggcgcggttgcctgaacaaccttgccgtattctcgatctcgggacgggtaccggggcgattgcgcttgcgctggctagcgagcgcccggactgcgaaattatcgctgtagatcgtatgcctgatgctgtctccctggcacaacgtaatgcccagcatctggcgatcaaaaatatccacattctgcaaagcgactggtttagcgcgctagccgggcagcagtttgcgatgattgtcagcaatccgccgtatattgacgagcaggaccctcatcttcaacaaggcgatgtccgctttgagccgctcactgcgctggttgcggcagacagtggaatggcagacatcgtgcatatcatcgaacagagccgtaacgcgctggtatccggcggctttctgcttctggaacatggctggcagcagggcgaagcggtgcgacaagcatttatcctcgcggggtatcatgacgtcgaaacctgccgtgactatggtgataacgagcgcgtaacgctcggccgctattatcaatgacaagtttttctacactgcttagtgttcatcttattagtatcgcgctttctgttgggctattaaccttacgtttctggctacgttatcagaagcatccacaggcatttgctcgctggacgcgcattgtgccgccggttgtcgatacgctgttactgttaagcggcattgcgttgatggctaaagcgcacatcctgccattttccgggcaggcacagtggctgactgaaaagctgtttggagttatcatttatatcgttttgggttttattgcactcgattatcgtcgtatgcacagtcagcaggcgcgcattattgccttcccgctggcgttggtggtgctgtacatcatcattaaactcgccaccacaaaagtaccgttactggggtaagtcatgagaagcttagctgatttcgaatttaataaagcgccattgtgcgaaggcatgatcctggcttgcgaagcaatccgccgcgattttcccagccaagatgtttacgacgaactggagcgtctcgttagtctggcgaaggaagaaatcagccagcttctgcctttagaagagcagttggaaaaactgatcgcgctgttttacggcgactggggatttaaagccagtcgcggtgtttatcgtctttccgatgcattatggctggaccaggtgttaaagaatcgacagggcagtgcggtaagtttaggtgcggttttattatgggtcgcgaatcgtctcgatttgccgctgctgccggtgattttccctacgcagctgatattgcgcattgaatgtccggatggcgaaatttggctgattaatccttttaacggtgaaagcttaagcgaacatatgctggacgtatggttaaagggaaatatcagcccgagcgcggaactgttttatgaagaccttgatgaagctgataacattgaggtaatccgcaaattgctggatacactcaaagccagcttgatggaagaaaatcagatggagctggcgttacgcaccagcgaagctttattacaattcaaccctgaagatccctatgaaattcgcgatcgcgggttgatttatgcgcaactggattgcgaacacgttgcgttgaacgatttaagttatttcgttgaacagtgtccggaagacccgatcagcgaaatgatccgtgcgcaaataaataacatcgcgcataaacatattgtgctgcattaattaatcgacattttactcaagattaaggcgatcctatgaaacaaaaagtggttagcattggcgacatcaacgtagcaaatgacctgccgttcgtactgtttggcggtatgaacgtgttggaatctcgcgatctggcgatgcgcatttgcgagcactacgtaactgtgacccagaaactgggtatcccttacgtgttcaaagcctcttttgacaaagccaaccgctcctccatccactcttatcgtggaccgggcctggaagaagggatgaaaatcttccaggagttgaagcagacttttggcgtgaaaattatcaccgacgttcacgaaccaagtcaggcacagcccgttgctgatgtcgtggatgtgattcagttgccggcgtttcttgctcgccagactgacctggttgaagccatggcgaaaaccggtgcggtaattaacgtcaagaaaccacagtttgtcagcccgggacagatgggtaatatcgttgataaattcaaagaaggcggcaacgaaaaagtgattctttgcgatcgcggtgctaacttcggctatgacaacctggttgtcgatatgctgggcttcagcattatgaagaaagtgtctggtaacagcccggtgattttcgacgtgacccacgcactgcaatgccgcgatccgtttggcgcagcttccggtggtcgtcgtgctcaggtggctgagctggcacgagccggtatggcggtaggtctggcggggctgtttattgaagcgcatccggatccggaacatgcgaaatgtgatggtccatccgcgctgccgctggctaaactggaaccgttcctcaagcagatgaaagcgattgatgatctggtgaaaggtttcgaagaactggataccagcaagtaatcttttttgcttgaaaaataaagtattagcgttctgcgttaagacttttttcatgggtgccggatacaaaaaaggccgcaggctgttacccctgcggccggtttcgggcgcatattgccatcacggcagcctgacgcccgttttcaccttacttccggttacgccaccagctgacaatcgctgcggtaataattcccgccaggatcggtgctgccaggtcgtgccagaaaatcatggcaaactgcgcgagcgtcatatagccgccttgttgtaatgacaacattttgcggctattcttgaattgttctggttcaagattagcccccgttctgttgtcaggttgtacctctcaacgtgcgggggttttctctttccagcaaccaatgccaccagggataaagcccccgcaacattgcgcctcaccggataacgccggcttggtgtggatactacgactcaattcatcttcacttcatccctgaaatgtttgcaatgaagagtgcattccggtttttcaacagctgttacagtcatttcatgagtgctctggatgaggcttccagctcgggttgccaatatttacttgtggaagtgataaagacaaaaatggccgcaggctgttacccctgcggccggtttcgggcgcatattgccatcacggcagcctgacgcccgttttcaccttacttccggttacgccaccagccgacaatcgctgcggtaataattcccgccaggatcggtgccgccaggtcgtgccagaaagtcatggcaaactgcgcgagcgtcatatagccgccttgttgtaatgacaacattttgcggctattcttgaagtgtctggtttcaagattagcccccgttctgttgtcaggttttacctctcaacgtgcgggggttttctctttccagcaaccaatgccaccagggataaagcccccgcaacattgcgcctcaccggataattccggcttggtgtggatactacgtctcaattcatcttcacttcatccctgaaatgtttgcaataaagagtacattccggcttttcaacagctgttgcagtcgtttcatgagtgctctggatgatgcttccagctcgggttgccaatatttacttgtggaagagataaagacaaaaatggccgcaggctgttacccctgcggccggtttcgggcgcatattgccatcacggcagcctgacgcccgttttcaccttacttccggttacgccaccagctgacaatcgctgcggtaataattcccgccaggatcggtgctgccaggtcgtgccagaaaatcatggcaaactgcgcgagcgtcatatagccgccttgttgtaatgacaacattttgcggctattcttgaagtgtctggtttcaagattagcccccgttttgttgtcaggttttacctctcaacgtgcgggggttttctctttccagcaaccaatgccaccagggataaagccccgcaacattgcgcctcaccggataacgccggcttggtgtggatactacgtcgcaattcatcttcacttcatccctgaaatgtttgcaatgaagagtacattccggcttttcaacagctgttgcagtggtttcgtgcagggtgtggtacaggctcgcaattctgattaacgacctgtccaggtagtatgaagaaatacaataagcaggaatttatattatctcccccgattaccgtcatcggaggagatataactgtcaggcaaatatcgtcatcaaataggcggcaaacagtgccagatgcgctgcgccattgagcatgttagtacgtccggtggagaaggagatatggcacagcactaaagaggccaccatcaccaccatttctggcgcaccaagtgcaaactgcaattcgttacccgtcataaaggcaattagcgtgacgacaggtacggtaaggctaatggttgctaacacactaccaaagaacagattcatcgcgcgctgaacctggttgttcaacactgcttttaatgcacctaaaccttccgggctcagaatcaacagtgccaccaggaagccagtaaaggcgacaggggcattcatgctgtcgagcaatgtctccaggctgctggcgttcattttggtcaccgcaataacggcaatcagatggataatcaaccagatagcatgccacaggctgctatgggcagacggtttaccgtgatgcgggtcgtcatcatcactgtcatcttcgtgctcgtagacaaacaaactttgatgcgttttggtctggatcagcaaaaatacgccatacattgccgcagaaattaatgctaccagtaacgcctgaccggtactaaaattcgccgcaggcagagccattggaaataccagtacgattatcgccagggggaacagcgcaattaaatactgcttgataccaaacagattcatatattgggtggcaaacttacgaccgcccaacaataaactaaagccaaccagcccaccggtaacaatcataatgatactatagagcgtatcacgcattagcgttggcgcggcgtcgccggttgccattaaagcactaatcaaactgacttcaagaataaccacactaaggctaagaataaggctaccgtaaggttctcccaggcgatgggctaatacgtccgcatgacggacaacactaaaggcgctacttaaaataccaataagcgcaagaagattgatggcaatgaccactggtagtgtctggctgcttccccacaggaacagcactaccagcgccagaaccgggaaaataaggctagtctccttgtggcgggtttttaccgcctcttgagcattactcattatggttatccctttgcagatgaatttatcgaaaatgtaaaaaataggtaggaaaaataacagaaagtgtctggatatcggtaacattttacgaatttttaccccgctgtcgattttttactcattggggcataaaaataagtattacgtttagacaatgtttgttttagcgtctcttaagaagagtctgacctgaaaattcttatgttttggcaagagtagatattgttgaccacacttaatgttcaactttgtaaaaggagtcaacgatgccgtataaaacgaaaagcgatctgccggaaagcgtaaagcacgttctaccgtctcatgcccaggatatctataaagaagcgttcaacagcgcatgggatcaatataaagataaagaagatcggcgtgatgacgccagtcgcgaagaaaccgcgcataaagtggcctgggctgctgtgaagcatgaatatgccaaaggggatgatgataaatggcataaaaaaagctaaaaccggtcgcttagttaaagctattcgtgcggtgttgccttgcaagtggtccgtggattgcatattgtcccgttagtggtttcaaaatgagcagtaaaaatgtccggaagacaccaaaaagttgtcgcagggaagtatgcagtggcggaagtgtaaggtgataacgcgtgatttcttgatgaatgccgattgtaaaacggcatttggtgccattgaagaaagtctcttatggagtgcagaacaacgggcggctagcctggcggcgacgctggcttgtcgacctgatgagggaccggtgtggatcttcggctatggaagcttgatgtggaatccggcactggagtttaccgaaagctgcaccggtacactggttggatggcatcgcgcattttgcctgcgcctgaccgccgggcgcgggactgcgcaccagccgggacggatgcttgcactgaaagagggcggacgcaccacaggcgtcgcctatcgactgccagaagagacgctggagcaggaactaaccctgttgtggaagcgagagatgattaccggctgttatctgccaacctggtgtcagcttgatcttgatgatggacgcacagtaaacgccattgtgtttattatggacccgcgacatccagaatatgaatctgatactcgcgctcaggtcatcgcgccgttgattgcggcggcgagcggtccgctgggaaccaacgcacaatacctgtttagtctggaacaggagcttatcaaactgggaatgcaggacgatgggctgaatgatttgctggtaagcgtaaaaaaactgctggcggagaattttccggatggtgtgttacgtccgggattcgcctgagtaaacttcccgcatagtggggcgtcagacgccccctcaaacattaaaatgtgagcactttatcggcactcagcgtccattgcgccagttccacaagagtaccgatttccaccccatcaatcagaggaagtgtactaatcccgcgcccgtcggtacaggttttgcacaatttcaccggtacattctgagcggtaaggatctccagcatttgctgaatgttgtagccttcccctggtttttgcccgcgcaacccggctgtgaccgcatcagacatgaggaacagacgcagatccagattgctctcctgctctcgtaacgcaatggccagccgcaagctgttaaacaaggattcgctcccgtaaggtgcgccattggcaacgatcacgattttttgcattatttactcctgtattcagggaattagacactcatcttctatcttactgcttctgcagcgtctgaccaatcggtcacatttttaaggattttcctgaaagcgcgagaaaatacgacaaaagttgccagtaatcgttattctttaaggctatggtttttcattattaccggaagttaccgacgttttgagccgtttcgttcctcgcattatcccgttttatttactcttgcttgtagcaggcggtacagctaacgcacaatctaccttcgagcaaaaagcggcaaatccctttgataataacaatgatggtctgccggatttaggcatggctcccgaaaatcatgatggggaaaaacactttgctgaaattgtgaaagatttcggcgaaaccagtatgaatgataacgggctggatactggcgagcaggcaaaagctttcgcattgggaaaagtccgcgacgcgcttagtcaacaggttaatcagcacgtagagtcctggctaagtccgtggggaaatgccagtgttgacgtcaaagtggataacgaaggacatttcaccggcagtcgtggaagctggtttgtgccgttacaagataatgatcgttatctcacctggagccagcttggtcttactcagcaggataatgggttggtgagcaatgtgggcgttgggcaacgctgggcgcgcggcaactggctggtgggttataacactttttatgacaacttgctggacgaaaatcttcagcgagcgggctttggtgccgaagcgtggggcgaatatttgcgattaagcacaaacttttatcagccgtttgctgcatggcatgaacagacagccacgcaggaacaacggatggcgcgcgggtacgacctgacagctcggatgcgcatgccgttctatcaacacctcaataccagtgtcagcctagaacagtattttggtgatcgtgttgatttgtttaactctggtacgggttatcacaatcccgtcgcgttgagtctgggattaaattacacccctgtgccattagtcactgtgacggcccagcataaacagggtgaaagtggcgaaaatcaaaataacctcgggctgaatcttaattaccgctttggtgtaccgctcaaaaaacaactttctgcgggcgaggttgccgaaagtcagagcttacgtggtagtcgctatgacaatccgcagcgaaataatctaccgactcttgagtaccgacagcgaaaaacgttaacggtgtttctggcgacaccgccgtgggatctaaaacctggcgaaacagtgccgctgaaattacaaatccgcagtcgttacggtattcggcaactgatttggcagggcgatacgcagatattaagtttgacgccgggcgcacaagccaacagcgcggagggctggacgctgatcatgcctgactggcagaacggggaaggggcaagcaatcactggcgattgtctgtggtggtggaagataaccaggggcagcgtgtctcctccaatgagatcacgctaacgcttgtcgaaccgttcgatgcattgagtaacgacgaactgcgctgggaaccgtaatcagaaaatgcgctcctgatgcacccataccgctgcttccacgcgagacttgagcttcattttcttcagcatgtgcttgacgtgcacttttactgtgctttcggtgatatccaggcggcgggcaatcatcttgttcggcaaaccctgggcaatcagcttgagaatatcgcgctcgcgtggggttaactggttaacatcgcgctcagtagtggcacggttagcgcgcaagctggcggccagaacaggcgttaatgcttcgcttaataccatttcgccagcagctgcctgatgcaatgctttcagcagatcttccggttccatatcttttaacagatagccatccgcgccgcgtttcagtgcggtgaccacatcttcttcatggttagagacgctgaataccacaatgcgcccactgagggacttttcgcgcagtttatccagcgtttccagaccgttcatgccgggcatattgagatctaacaggatcagatcgggatcaagagactccgccagttcaataccctgttcgccattactcgcttcgccaaccacggtgatatctggtgccatactgataagctgttttacgccagttcgcagcatcgggtgatcgtcaatcagcaggatagtagccggttcctgattactcatgggtatctccttggacgtctgtgaaagttttttcgggaataaaggtgaccaccacttcggtgccaccactttcacgacggcggacgcggcaatcgcctcgtaaactttgcgcacgatcgcgcattattatcatgccgtagtgattgctgcggatggcattttcaggcacgccgcagccgttatcctggacggtcagtttgacctgattatcgttttgcgccaccgtcaccacgacttcactcgcttggctatgtttgagggcgttacttaatgcctcacgggcaatttgcaacaagtggattgcctgatggctaggcaccaggcgaggcggcaattgataatccagcttcaccgggaagccaaatttggcgctgtactcttcgcaactcgcctccagcgccggacgtaatccaggctcggtgagctgcaagcggaatgtggtgagcaattcacgcaactgcgcccaggatgcattcagttcgttacggatctgacttaacagttcgcggctgctttctggcagcgcatcgccctgcatctgtaaacaactcacctgcatcttcatgcaagagagagattgggcaatagaatcatgcagttcgcgcgcaatggtggcacgctcttccatcacgatcaactgttgctgacgttcctgatggcgatccagcgccagcgtggcggtgagttgttcaaccagggtatccaccagttgttgttgatcatggctaagatgacgcccctgcggcagggtcgccagcaaaataccgtactgcgtatgagagtcagccagccgccacttcagggtcgtgccgcgatcaccaacgggtaatacgccgcgcgggcagagctggcagcctttatcatcacaagtcatatctggctggcaggtaaactcctgatgattctcttcatcatcagtgtcatacacccgcaattcgatatcacgtagcagggttaaattctgtaagccgttgagtacaggactcaggcgttcacacagcggggcgcgggaatgcaaacggcggttagcctgccataaaaaagagaggatctgatttttatgctccagcccggcggttttctcctgaacccgctgctcaagtacggcataactttcggccagttctgcagacatattgttcaacgcagttccaagcatcgccatttcgttgcgcccgctgatgtttgcgcgttgggtaaaatcgcgatgactgacggcactcgccattgccagcagttgccgccacggttgtagcagtcgcgcccgcaaccagataatagtgaacaccagtaaaagtgccataaataccgccattacccgatggaccagtaccactgtctcgatgcgcatttccgtggtgcggtcaaaaccagataccagttgatcaagcccggcaacaaactggctgacatccgcactcaccgtttctcggttttgtgcacgcatcagcgcagggatcagttcattacgccagtaatcttgtaaaccctgtaattgcgccagttgtccgtctcgttctgctgctcgagtcaactcggcgctaaatgccgtttgttccatctctttaattaagggcttgtctttctcgcttaatggcactgccgccaacagacggtaactttgcatgcgcaggcttcccgctttgttgatcgcatgggcgctgccctgaacgccttgcaccagccagccagaaaccgccatccctgccagtccaatagcagtagaaagcaacacaataagcgcaacctgattaaccagggtgagcggagagagacaacgtttaagcatgtaaacctcttccttcaggctttaaatgagcaataaccttaatgaatgtgacgatacattctggaatggcagtattctcggctattggctgaagtatacccatacccggaaagagttactccttatttgccgtgtggttagtcgctttacatcggtaagggtagggattttacagcaccgtgaaaaatctcataatttttatgaagtcactgtactcactatgggtaatgataaatatcaatgatagataaagttatcttatcgtttgatttacatcaaattgcctttagctacagacactaaggtggcagacatcgaaacgagtatcagaggtgtctatgagtcacagttccgcccccgaaagggctactggagctgtcattacagattggcgaccggaagatcctgcgttctggcaacaacgcggtcaacgtattgccagccgcaacctgtggatttccgttccctgtctgctgctggcgttttgcgtatggatgttgttcagcgctgttgcggtgaacctaccgaaagtcggctttaattttacgaccgatcagctatttatgttgactgcgctgcctagcgtttctggcgcgttattacgtgttccatactcctttatggttcctatcttcggtggtcgtcgctggacggcgttcagcaccggtattctgattattccttgcgtctggctgggttttgccgtgcaggatacctccacgccttatagcgtcttcatcatcatctctctgctatgcggctttgctggcgcgaacttcgcatccagtatggcaaacatcagcttcttctttccgaaacagaagcagggtggcgcgctgggtctgaatggtggtctgggaaacatgggcgtcagcgtcatgcagttggttgctccgctggtggtaagtctgagcattttcgcagtatttggtagccagggcgtcaaacagccggatgggactgagctgtatctggcgaatgcgtcctggatatgggtgccgttccttgccatcttcaccattgcggcgtggtttggcatgaacgatcttgctaccagcaaagcctccatcaaggagcagttgccggtactcaaacggggtcatctgtggattatgagcctgctgtatctggcaaccttcggctccttcatcggcttctccgcgggctttgcaatgctgagtaaaacgcagttcccggatgttcagattctgcaatacgctttcttcgggccgtttattggtgcgctggcgcgttctgcaggtggtgcattatctgaccgtctgggcggaactcgtgtcacgctggtgaactttattctgatggcgattttcagcggcctgctgttcctgaccttaccgactgacgggcagggcggaagcttcatggcgttcttcgcggtcttcctggcgctgttcctgacagctgggctgggtagtggttccactttccagatgattagtgtgatcttccgtaaactgacaatggatcgcgtgaaagcagaagggggttctgacgaacgtgcgatgcgtgaagcggcaaccgacacggcggcggcgctgggtttcatctctgcgattggcgcgattggtggcttctttatcccgaaagcgtttggtagcagcctggcattaacgggtagcccagtcggcgcaatgaaggtatttttgattttctatatcgcctgcgtagtgattacctgggcggtatatggtcggcattctaaaaaataaaccgttactcgtcatacttcgggttacatgtgctgcggctgcgttcattcaccccagtcacttactttagtaagctcctgggattcattcacttgccgccttcctgtaaaccgaattatatagagtaaaatatttgattatcctttgcgcggcatgatgtcgcgctttttttatgcgtcatttagttacaacatactaatgttatatggtttatttcgccggatttcattaagagccattaatatgttacccatggggaatactccttaatacccatctgcataaaaatcttaatagtttaaataactacaggtataaaacgtcttaatttacagtctgttatgtggtggctgttaattatcctaaaggggtatcttaggaatttactttatttttcatccccatcactcttgatcgttatcaattcccacgctgtttcagagcgttaccttgcccttaaacattagcaatgtcgatttatcagagggccgacaggctcccacaggagaaaaccgatgagtaaattcctggaccggtttcgctacttcaaacagaagggtgaaacctttgccgatgggcatggccagcttctcaataccaaccgtgactgggaggatggatatcgccagcgttggcagcatgacaaaatcgtccgctctacccacggggtaaactgcaccggctcctgcagctggaaaatctacgtcaaaaacggtctggtcacctgggaaacccagcagactgactatccgcgtacccgtccggatctgccaaaccatgaacctcgcggctgcccgcgcggtgccagctactcctggtatctttacagtgccaaccgcctgaaatacccgatgatgcgcaaacgcctgatgaaaatgtggcgtgaagcgaaggcgctgcatagcgatccggttgaggcatgggcttctatcattgaagacgccgataaagcgaaaagctttaagcaggcgcgtggacgcggtggatttgttcgttcttcctggcaggaggtgaacgaactgatcgccgcatctaacgtttacaccatcaaaaactacggcccggaccgtgttgctggtttcagcccaattccggcaatgagcatggtttcttacgcaagcggtgcacgctatctcagcctgattggcggtacttgcttaagcttctacgactggtactgcgacttgcctcctgcgtctccgcaaacctggggcgagcaaactgacgtaccggaatctgctgactggtacaactccagctacatcatcgcctgggggagtaacgtgccgcagacgcgtaccccggatgctcacttctttactgaagtgcgttacaaagggaccaaaactgttgccgtcacaccagactacgctgaaatcgccaaactgtgcgatctgtggctggcaccgaaacagggcaccgatgcggcaatggcgctggcgatgggccacgtaatgctgcgtgaattccacctcgacaacccaagccagtatttcaccgactatgtgcgtcgctacaccgacatgccgatgctggtgatgctggaagaacgcgacggttactacgctgcaggtcgtatgctgcgcgctgctgatctggttgatgcgctgggccaggaaaacaatccggaatggaaaactgtcgcctttaataccaatggcgaaatggttgcgccgaacggttctattggcttccgctggggcgagaagggcaaatggaatcttgagcagcgcgacggcaaaactggcgaagaaaccgagctgcaactgagcctgctgggtagccaggatgagatcgctgaggtaggcttcccgtactttggtggcgacggcacggaacacttcaacaaagtggaactggaaaacgtgctgctgcacaaactgccggtgaaacgcctgcaactggctgatggcagcaccgccctggtgaccaccgtttatgatctgacgctggcaaactacggtctggaacgtggcctgaacgacgttaactgtgcaaccagctatgacgatgtgaaagcttataccccggcctgggccgagcagattaccggcgtttctcgcagccagattattcgcatcgcccgtgaatttgccgataacgctgataaaacgcacggtcgtagcatgattatcgtcggtgcggggctgaaccactggtatcacctcgatatgaactatcgtggtctgatcaacatgctgattttctgcggctgtgtcggtcagagcgggggcggctgggcgcactatgtaggtcaggaaaaactgcgtccgcaaaccggctggcagccgctggcgtttgcccttgactggcagcgtccggcgcgtcacatgaacagcacttcttatttctataaccactccagccagtggcgttatgaaaccgtcacggcggaagagttgctgagtccgatggcggacaaatcccgctataccggacacttgatcgactttaacgtccgtgcggaacgcatgggctggctgccgtctgcaccgcagttaggcactaacccgctgactatcgctggcgaagcggaaaaagccgggatgaatccggtggactatacggtgaaatccctgaaagagggttccatccgttttgcggcagaacaaccagaaaacggtaaaaaccacccgcgcaacctgttcatctggcgttctaacctgctcggttcttccggtaaaggtcatgagtttatgctcaagtacctgctggggacggagcacggtatccagggtaaagatctggggcaacagggcggcgtgaagccggaagaagtggactggcaggacaatggtctggaaggcaagctggatctggtggttacgctggacttccgtctgagcagcacctgtctctattccgacatcattttgccgacggcgacctggtacgaaaaagacgacatgaatactagcgatatgcatccgtttattcacccgctgtctgcggcggtcgatccggcctgggaagcgaaaagcgactgggaaatctacaaagccatcgcgaagaaattctccgaagtgtgcgtcggccatctgggtaaagaaaccgacatcgtcacgctgcctatccagcatgactctgccgctgaactggcgcagccgctggatgtgaaagactggaaaaaaggcgagtgcgacctgatcccaggtaaaaccgcgccacacattatggtcgtagagcgcgattatccggcgacttacgaacgctttacctctatcggcccgctgatggagaaaatcggtaatggcggtaaagggattgcctggaacacccagagcgagatggatctgctgcgtaagctcaactacaccaaagcggaaggtccggcgaaaggccagccgatgctgaacaccgcaattgatgcggcagagatgatcctgacactggcaccggaaaccaacggtcaggtagccgtgaaagcctgggctgccctgagcgaatttaccggtcgtgaccatacgcatctggcgctgaataaagaagacgagaagatccgcttccgcgatattcaggcacagccgcgcaaaattatctccagcccgacctggtctggtctggaagatgaacacgtttcttacaacgccggttacaccaacgttcacgagctgatcccatggcgtacgctctctggtcgtcagcaactgtatcaggatcaccagtggatgcgtgatttcggtgaaagcctgctggtttatcgtccgccgatcgacacccgtagcgtgaaagaagtgataggccagaaatccaacggcaaccaggaaaaagcgctcaacttcctgacgccgcaccagaagtggggtatccactccacctacagcgacaacctgctgatgctgactttaggtcgcggtggtccggtggtctggttgagtgaagccgatgccaaagatctgggtatcgccgataacgactggattgaagtcttcaacagcaacggtgctctgactgcccgtgcggttgtcagccagcgtgttccggcagggatgaccatgatgtaccacgcgcaggaacgtatcgttaacctgcctggtagcgaaattacccaacagcgtggtggtatccataacagcgtcacccgtatcacgccgaaaccgacgcatatgatcggcggctatgcccatctggcatacggctttaactactatggcaccgtaggttctaaccgcgatgagtttgttgtagtgcgtaagatgaagaacattgactggttagatggcgaaggcaatgaccaggtacaggagagcgtaaaatgaaaattcgtagtcaagtcggcatggtgctgaatctcgataagtgcatcggctgccacacctgtagtgttacctgtaaaaacgtctggaccagccgtgaaggcgtggaatatgcgtggttcaacaacgtggaaaccaagccgggccagggcttcccgactgactgggaaaaccaggaaaaatacaaaggcggctggatccgtaaaatcaacggcaaactgcagccgcgcatgggtaaccgtgccatgctgctgggtaaaatcttcgctaacccgcatctgccggggatcgacgattattacgagccgttcgattttgactatcagaacctgcataccgcgccggaaggcagcaaaagccagccgattgcccgtccgcgtagcctgattaccggggaacggatggcgaaaatcgaaaaagggccgaactgggaagatgacctgggcggtgagtttgacaaactggcgaaagacaagaacttcgacaacatccagaaggcgatgtatagccagttcgaaaacaccttcatgatgtatttgccgcgcctgtgcgaacactgcctgaacccggcatgtgtggcgacctgcccgagcggtgcgatttacaagcgtgaagaagatggcatcgtcctgatcgaccaggataaatgccgtggctggcgtatgtgcatcactggatgcccgtacaaaaaaatctacttcaactggaagagcggtaagtctgagaagtgcatcttctgctatccgcgtattgaagcgggtcagccgaccgtgtgcagtgaaacctgtgtcggtcgtatccgttatcttggcgtgctgttgtacgatgccgacgctattgaacgtgcagccagcaccgagaacgagaaagatctttaccagcgtcagctggacgtgttcctcgatccgaacgatccgaaagtcatcgagcaggcgattaaagacggtattccgctgagcgttattgaagccgcacagcagagcccggtttataaaatggcaatggaatggaaactggcgctgccgctgcatccggaatatcgcacactgccgatggtctggtacgtgccgcctctgtctccgattcagtctgcagcagacgcgggtgagctgggtagcaacggcattctgccagacgtcgaaagcctgcgtattccggtacagtatctggcgaatctgctgaccgccggtgataccaaaccggtactgcgcgcactgaaacgtatgctggcgatgcgtcattacaaacgtgctgaaaccgttgacggtaaagttgatacccgtgcgctggaagaggtcggtctgaccgaagcccaggcacaggagatgtaccgttatctggcgattgctaactacgaagatcgctttgtggtgccgagtagtcatcgtgaactggcacgggaagccttcccggagaaaaatggctgcggctttacctttggtgatggctgccacggtagtgataccaaattcaatctgttcaacagccgtcgtatcgatgccatcgatgtgaccagcaaaacggagccgcatccatgatcgaactcgtgattgtaagccgtctccttgaatatccggatgctgccttatggcagcatcaacaagagatgtttgaggcgattgccgcgagcaaaaatctgccaaaagaggatgcccatgcgctgggcattttcctgcgcgatttaacgacgatggatccgctcgatgcccaggcgcagtacagcgaactgttcgaccgtggccgcgccacgagtctgttgctgtttgaacatgtgcacggcgaatcccgcgaccgcggccaggcgatggtggacctgctggcgcagtacgagcagcacggcttgcagttaaacagccgcgaattgccggaccatctgccgctgtatctggagtacctggcgcagctgccgcaaagcgaagccgtggaaggtttgaaagatatcgcgccgattctggcattgctgagcgcgcgtctgcaacagcgtgaaagccgttatgccgtgctgtttgatctgctgctgaaactggcgaataccgctatcgacagcgacaaagtggcggaaaaaattgccgacgaagcgcgcgatgatacgccgcaggcgctggatgctgtctgggaagaagagcaggttaaattctttgctgacaaaggctgcggtgatagtgcaatcactgcgcatcagcgtcgctttgccggtgccgtcgcgccgcaatatctgaatatcaccaccggaggacagcactaatgcaattcctgaatatgttcttctttgatatctacccgtacatagccggggcggtcttcctgattggtagctggctgcgttatgactacgggcagtacacctggcgcgcggcgtccagccagatgctggatcgcaaagggatgaacctggcgagcaacctgttccatatcgggattctggggatttttgtcggtcacttcttcggtatgctgacgccgcactggatgtatgaagcctggctgccgattgaagtgaaacagaaaatggcaatgtttgctggtggtgccagcggcgtgctgtgtctgattggcggcgtgctgttgctgaaacgtcgtctgttcagcccacgcgtgcgtgcaaccactaccggagcggatatcctgatcctgagcctgctcgttatccagtgcgcgctgggcctgttgaccattccgttctccgctcagcatatggacggtagcgagatgatgaaactggttggctgggcgcagagcgtggtgaccttccacggtggcgcttctcaacacctcgatggtgtggcgtttatcttccgtctgcacctggtgctggggatgacgttattcctgctgttcccgttcagccgtctgatacacatctggagcgtaccggtggagtatctgacacgtaagtaccagctggtgcgcgctcgtcactaagcgaattttagttcacatagaccctgcttcggcggggtttttttatgggcacggtgcggggtgagttgtcggatgcgcttcgcttatccgacctacaggggaggatattgtaggcccggtaaacgtggtgccatcgggcaaaattagctcggagtaacaggttttgattatttaaggaagcgatggtggtgggggaaggattactcagcgctgcgcgcttcgcccttcgggtcgttgcctgcggcaacgctctcagcctggcgctcaagagcaaccttggtcgaagcttcagttccttccccgcttgggcagaatatttgattgcggatagctttgagaattccggggcttttgaaagtgatggtggtgggggaaggattactcagcgctgcgcgcttcgccctagcggtcgttgcctgcggcaacgctctctcgctgacgctcgagccgaaccttaatcgaagcttctcatccttccccgcatgggcagaatatttgattgcggattcgcttgagagttcagggacttttgaaagtgatggtggtgggggaaggattactcagcgctgcgcgcttcgcccttcgggtcgttgcctgcggcaacgctctctcgctggcgctcgagtgctaccttggtcgaagcttctcatccttccccgcatgggcagaatatttaattgcggattcgttgggaagttcagggacttttgaaagtgatggtggtgggggaaggattcgaaccttcgaagtcgatgacggcagatttacagtctgctccctttggccgctcgggaaccccaccaggggtaattcaaattttgaggtaatgcttgagatggtggtgggggaaggattattcgtcgcttcgctcctcacccttcgggccgttgcctgtggcaacgttctctcgctttcgctcgaatcgaaccttagtcgaaggttctcacccttccccgatgagtgcaaactttcacaatctcaccgaagttaccacatcgctgtggtgaattatggtggtgggggaaggattcgaaccttcgaagtcgatgacggcagatttacagtctgctccctttggccgctcgggaaccccaccacggggtaatgctttttactggcctgctcccttatcgggaagcggggcgcatcatatcaaatgacgcgccgctgtaaagtgttacgttgagaaaaatgaactggttgcgtaattttcatccgtaacggattaaaggtaaccagttatttttgctggcgattaaagaataatcgttcgattaccgtaaacaaagacgcgctgtgccagtactttgtatagtgcacgacttaagacgtttttctcgacgtcacgacctgcgcgcatcatatcttcagctgtgtaggtatgatcgacatgaataacgtcctgcatgatgattgggccttcgtccagattgtcattcacatagtgagcggttgcgccaataatcttcacaccacgttcataggcctggtgataaggacgtgcgccaataaacgctggcaggaaactatggtgaatattgatgatcttattcgggaagcgtgccacaaattccggcgttaatacccgcatatacttcgccagcaccacgtagtcaggttgataagcatcaatggcatccgccatcttttgatcgtgctcgttgcgggttaacccttcatggcttaccagctcaaacggaatatcaaaacgctcaaccagagaacgtaaagtatcgtggttaccaataactgccgcgatttcgacatccaggccgccgtaattggctttcatcaacaaatcgccaaggcaatgcgcttctttagtgaccagaatcactatccggcgacgaccggcaggattcagctcacgcacggagccttctggcaatgcgctatcgagatccgccagcagggtggaatcattaaaaatcccttccagttccgtgcgcataaaaaagcgcccggtacggtgatcaacaaattcattgttctgtacgatatttaactcgtgcttgtagcaaatattggtaatacgtgcgatcagacctttttggtccggacaaatagtacgcagaactttacgttggagactatgcattgctggaaaaaccttgttgagagtgtttgctaaaccgtaccgtcaaccattattggccgcagcactttttaaattttttaccactaccacaagggcagggatcgttgcgaccaaactgcggacgtgtaccgtcaatatagtaccattgaccgttttctttcaaaaatcggctacgttcaattattgcacctgttttaccaccttcggtaaatcgagcaacaaaactgacaaatccgatattgtcggcgtcctgccaacaatgttcaaatacggtcaatcccaaccattcagtatgcgcaaatccggccatcaattcggcacgtaacgccgctgctccacaagagggatgccaggtctttattaaataatctgcgtcttgcatcacaaaagcgcagtaacggctacgcatgagatgttctggatcaggtgcaaccttttcaccagacacataagggtggcaacataggctatactcgacagcactaccacagggacaaagctgagacacaaataatctccctggaaacaataacggcgtattaaccgcctgagtagcactatgttaaccgagcagtagcgatgtggctacgattgcattccaggggaatcttgcgggaataatgagaaagataaaaatagggctggcgctgggatctggcgcggcgagaggttggagccatattggcgttattaatgcgctaaaaaaagtgggtattgaaattgatatcgttgcaggatgtagtattggtagcctggtgggcgctgcctatgcatgcgatcgattatctgcgctggaagattgggtgacctctttcagttattgggatgttttacgcctgatggatctctcctggcagcgcggtgggttactgcgcggcgagcgtgtcttcaatcaataccgcgaaataatgccggaaacagagatcgaaaattgttcccgtcgctttgcggctgttgccaccaatttaagtacgggacgtgaattatggtttactgaaggcgatctccatcttgctattcgcgcaagttgcagtattccaggactcatggcacctgttgcacataacggctactggctggttgatggagcagtcgttaacccaattcctatttccctcacgcgtgcattgggggctgatattgtgatagcggttgacctgcagcacgatgctcatttgatgcaacaagatttgctctcctttaatgtcagtgaagaaaatagcgagaatggtgattctctgccgtggcatgcgcgtctgaaagaaaggttaggcagcataacgacacgtcgggcggtgacagcgccaacggcaacagagattatgaccacttctatccaggtgctggagaaccgccttaaaaggaaccgcatggcaggtgatccgcccgatattctgattcaacctgtttgcccgcaaatatctacgcttgatttccatcgcgcgcacgctgccattgcggccggacagctggcagtggaaaggaaaatggacgaacttttgccgttggtacgcaccaacatttgaccagaatttttatctacacttaagttaattctgacaggcgcaggtggcaatagcatgccactattgagtaaagccagtcaggggagagaacatgacgcagccattggtcggaaaacagattctcattgttgaagatgagcaggtatttcgcagccttctggatagttggttttccagtttgggagcgacaacggtactggcggctgatggggtggatgcccttgagttgctgggaggtttcactccagacctgatgatatgtgatatcgcgatgccacgaatgaacgggcttaaactgctggagcatatacgtaacagaggcgaccagaccccagttctggtgatatctgccactgaaaatatggcagatattgccaaagcgttacgtctgggcgttgaagatgttttgctgaaaccagttaaagatctgaatcgcttgcgcgagatggtttttgcctgtctctatcccagcatgtttaatagccgcgttgaggaagaggaaaggctttttcgcgactgggatgcaatggttgataaccctgccgcagcggcgaaattattacaggaactacaaccgccggttcagcaggtgatttcccattgccgggttaattatcgtcaattggttgccgcggacaaacccggcctggtgcttgatattgccgcacttagcgaaaacgatctggcattttattgccttgatgtcacccgagctggacataatggcgtacttgctgccttgttattacgcgcattgtttaacggattattacaggaacagcttgcacaccaaaatcaacggttgccagagttgggcgcgttattgaagcaggtaaaccatttacttcgtcaggccaatctgccggggcagtttccgctattagttggctattatcatcgcgaactgaaaaatctcattctggtttctgcgggtctgaatgcgacgttaaataccggcgaacaccaggtgcaaatcagtaatggtgttccgttaggcactttaggtaacgcttatttgaatcaattgagccagcgatgcgatgcctggcaatgccaaatatggggaaccggtggtcgactgcgcttgatgttgtctgcagaatgagcaaacgataacgcgggctaaatttgcattacctgctaatgtcggctggtggtactatcgtcgccattcgtataagtaattgtcttaattatgctaactcgcctccttttcagaacttagccccttcggggtgctgatatactgggatgcgatacagaaatatgaacacgttcaaaacacgaacagtccaggagaatttaaatggctgccattaatacgaaagtcaaaaaagccgttatccccgttgcgggattaggaaccaggatgttgccggcgacgaaagccatcccgaaagagatgctgccacttgtcgataagccattaattcaatacgtcgtgaatgaatgtattgcggctggcattactgaaattgtgctggttacacacagttctaaaaactctattgaaaaccactttgataccagttttgaactggaagcaatgctggaaaaacgtgtaaaacgtcaactgcttgatgaagtgcagtctatttgtccaccgcacgtgactattatgcaagttcgtcagggtctggcgaaaggcctgggacacgcggtattgtgtgctcacccggtagtgggtgatgaaccggtagctgttattttgcctgatgttattctggatgaatatgaatccgatttgagtcaggataacctggcagagatgatccgccgctttgatgaaacgggtcatagccagatcatggttgaaccggttgctgatgtgaccgcatatggcgttgtggattgcaaaggcgttgaattagcgccgggtgaaagcgtaccgatggttggtgtggtagaaaaaccgaaagcggatgttgcgccgtctaatctcgctattgtgggtcgttacgtacttagcgcggatatttggccgttgctggcaaaaacccctccgggagctggtgatgaaattcagctcaccgacgcaattgatatgctgatcgaaaaagaaacggtggaagcctatcatatgaaagggaagagccatgactgcggtaataaattaggttacatgcaggccttcgttgaatacggtattcgtcataacacccttggcacggaatttaaagcctggcttgaagaagagatgggcattaagaagtaacatccgtatcggtgttatccacgaaacggcgttgagcaatcgacgccgtttttttatagcttattcttattaaattgtcttaaaccggacaataaaaaatcccgccgctggcgggattttaagcaagtgcaatctacaaaagattattgcttgatcaggaaatcgtcgagggatttaccttgctcatccattgcttttttgattacagctggagtacggccttggccagtccaggttttagtttcgccgttttcgtcaacgtagctatattttgccggacgctgagcacgtttagctttggtgccagatttaacggcagcaaggctattcagcagttcgttcgggtcaataccgtcagcgatcagcatttcgcgatattgctgcagtttacgagtgcgctcttcaacttcagcagcagccgcgctttcttcttcgcgacgttcgttaacaacaacttctaatttttccagcatttcttccagcgtttcaagtgtacattctcttgcctgcgcacgaagagtacggatgttgttcagaattttaagtgcttcgctcattgtagtaatctcaaacttatattggggtggtttgttgaggtaataatagagccttaaattcagttgtgcaatagccaggaatgtaaggaattcaaaattgttctttattttgtgccgccaataaatatcttttcataaaattagccagaaaagacgcggcatatagccctatttacaccgatgatttcgcagcacgtgaggttaaaacttcctgattcatgtcacattttatggggagattatcgtaggctgacgacctttcagtcttctgtattagttgtgtttacgagaattccctattaagcgaatgatgaaaagtagaacagtcgcaataagagcatggacttagtattgcactatctcctggaggtcaacagagggctattacttgcgcaacaggttaaagattgtgaatagttaccagcagtcatttacccgcttataacaagcgaggcagttgtaatgatagctcagaaggattatgcaaggcttcgtaagggagaacgcatatacccacttctgtgcatactgttgagctgaaaaactgacgaattatgataaactccagccaactttatttcatatcattgagggcctgtggctgatggcacagctatatttctactattccgcaatgaatgcgggtaagtctacagcattgttgcaatctagttacaattaccaggaacgcggcatgcgcactgtcgtatatacggcagaaattgatgatcgctttggtgccgggaaagtcagtagccgtataggtttgagtagccctgcaaaattatttaaccaaaatagtagtttatttgatgagattcgtgcggaacatgaacagcaggcaattcattgcgtactggttgatgaatgccagtttttaaccagacaacaagtatatgaattaagcgaggttgtcgatcaactcgatatacccgtactttgttatggtttacgtaccgattttcgaggtgaattatttattggcagccaatacttactggcatggtccgacaaactggttgaattaaaaaccatctgtttttgtggccgtaaagcaagcatggtgctgcgtcttgatcaagcaggcagaccttataacgaaggtgagcaggtggtaattggtggtaatgaacgatacgtttctgtatgccgtaaacactataaagaggcgttacaagtcgacagtttaacggctattcaggaaaggcatcgccacgattaataagaatttctttactgacagggtgagcagggcacttttatcctgtcagttcgttttacgcacttcttccgggctatatacccttctcggcagttttttaacgccgctatacgcctcacagggctcttaagcaccgacgttgacttgtgacctgtaaagtacaatatccctgtgtttaggcgttatacatcgtcgcaaatatgatgaaggctaatgctgtcggtttatggaaaagttgctttgggtaaacaaaaaatacggccccagaagggcaatgccgttcacttaagaggagcggcactatgtttcacaggataacgggtttttgatatcttaaccgacctcggccttgatggtcgggggcgttttgttatgaacaccacttccagagcaccccgaagatgctccagtcgtttcgggatggtccctggtgacgccgtgtttcccagctctatcatttctgatgcgatattcttccacgcaggcagtagccagtggcggttacaacccttctggttcagcgtcagcagcaggtcttcgctgtaaaaaagtttatcaaacaacgtaatagagttatccgggatggtggcgagcatggagtgggccagcacagtttcgctctgccggtaaggtgcggtcacggcattcagcagaatgtgacttcccaggttcattaaggccaccagacgcataaccgggtaggcgttctgccgcttagtggatgtgttggcagacccataatattcacgcagctcgggtttatcaggtgtcctgaactgtgcgccatcaatggcaaaaagttgcaggccgtgccagtcatccttcaggtaacgttccgcgcccctgtctgtgcggtctggcggaagagccattccactggggcggcccccacgcgctgacgcgcctgggtgacagcgctgcgggccagcaggttcatccccgcttcgccatccgcgctcaggttcagacggcgaacaacatcggtaattggctcattgcaccaccatccagataaccatgtcccccggtaaacgacggcggcgaacggtcgcatgagcagaaagcgtcaggcagtgttgtatccactcggtgggaaggtgttctgcaaatagttgtgcagagggcggaggcataagcggatggtcactgaaatcgagcagatcattgagaagtggcataagaaaacggctccctgttgtggaagccgttatagtgcctcagtttaaggatcggtcaactaatccttaactgatcggcattgcccagaaggggccgtttatgttgccagacagcgctactgattaagcggattttttcgcttttttctcagctttagccggagcagcttctttcttcgctgcagtttcaccttctacataatcacgaccgtagtaggtatccagcagaatctgtttcagctcggagatcagcgggtaacgcgggttagcgccggtgcactggtcatcgaatgcatcttcagacagtttatccacgttcgccaggaagtctgcttcctgaacgccagcttcacggatagatttcggaatacccagttcagctttcagcgtttccagccatgccagcagtttctcgatcttagcagcagtacggtcgcccggtgcgctcagacccaagtggtcggcaatttcagcataacgacggcgagcctgcggacggtcatactggctgaatgcagtctgcttggtcgggttgtcgttcgcattgtagcgaataacgttacaaatcagcagggcgtttgccagaccgtgcggaatatggaactgggaacccagtttgtgcgccatactgtgacatacacccaggaaggcgttcgcaaacgcgatacccgcgatagtcgctgcactgtgaacacgttcacgcgctaccggatttttagacccttcgtggtaggacgctggcagatattctttcagcagtttcagtgcctgcagagcctgaccatcagagaactcagatgccagtacagaaacataagcttccatggcgtgagttactgcgtccagaccaccgaaagcacacagggacttcggcatgtccataaccaggttggcgtcgacaatcgccatatccggagtcagcgcatagtctgccagcggatatttctgaccagtagcgtcgtcagttacaaccgcaaacggagtgacttcagaacctgtaccagaagtggtggtgacagcgatcattttcgctttcacgcccattttcgggaacttgtagatacgtttacggatatccataaagcgcagcgccagctcttcgaagtgagtttccggatgttcgtacataacccacatgatcttcgcggcgtccatcggggaaccaccacccagcgcgataatcacgtctggtttgaaggagtttgccagttctgcacctttacgaacgatgctcagggtcgggtccgcttctacttcgaagaagacttcagtttcaacgcctgctgctttcagtacggaagtgatctgatcagcataaccattgttgaacaggaagcggtcagtcacgatgagcgcacgtttgtggccatcagtaatcacttcatccagcgcgattggcagggagccacggcggaagtagatagatttcggaagtttgtgccacaacatgttttcagctcgcttagcaacggttttcttgttgatcaggtgtttcggaccaacgttttcagagatggagttaccaccccaagaaccacaacccagagtcagggaaggtgcgagtttgaagttatacaggtcaccgataccaccctgagacgctggggtgttaatcaggatacgcgccgttttcattttctgaccgaagtaagaaacgcgagccggttggttatcctggtcagtgtacaggcaagaggtatgaccgataccgcccatagcaaccagtttctctgctttttctaccgcgtcttcgaaatctttagcgcggtacattgccagagtcggggacagtttttcatgtgcgaacggttcgctttcatcaacaacggtcacttcaccgatcagaatcttggtgttttctggtacagagaagcctgccagttcagcaattttataggctggctgaccaacgatagccgcgttcagcgcaccgtttttcaggataacatcctgaacagctttcagctctttaccctgcaacagatagccgccgtgggttgcaaaacgttcacgtacagcgtcataaacagagtcaacaacaacaacagactgttcagaagcacagattacgccgttgtcgaaggttttggacatcagtacagatgcaactgcacgtttgatatcagcagtttcatcgataacaactggagtgttgcccgcgcctacaccgatagctggtttaccggagctgtatgcggctttaaccatgcccggaccaccagtcgcgaggatcaggttgatgtctgggtggtgcatcagtgcgttagacagttcaacagaaggttgatcgatccagccgatcagatctttcggagcaccggcagcgatagcagcctgcagaacgatatcagccgctttgttggtggcatcttttgcacgcgggtgcggggagaagataatggcgttacgggtcttcagactgatcaggcttttgaagatagcagtactagtcgggttagtggtcggaacgataccgcaaataataccgattggttcagcgatagtgatggtaccaaaagtgtcgtcttcagacagaacaccacaggttttttcatctttataggcgttgtagatatattcagaagcaaagtggtttttgatcactttatcttcgacgatacccatgccggattcggcaacggccattttcgcgagtgggattcgagcatctgcagcagccagagcggcggcgcggaagattttgtctacttgctcttgagtgaaactggcatattcacgctgggctttttttacacgctctacgagtgcgttaagttcagcgacattagtaacagccataatgctctcctgataatgttaaacttttttagtaaatcatctgctcgaatacgagagtatagtcagtgcggtgatgatttgcttaacctatgaaaatcaaaagcttactcgcgctcacactcactgtgatttactaaaagagtttaaacattagagttattatctctaatgcgtcacttccaggtggcgtaagcaagattactcacttctgggtactgattacgtgatccaaatcaaatttttgcaaagctgacacctttcagcatcgcttttcgccattatagctaacagttaataaattgtagtatgatttggtggctacattagcatgttttgcacaactagataacaataacgaatgatagcaattttaagtagttaggaggtgaaaaatgctgtcaaaaggcgtattgtcagcgcgtcttttcaaccttatttatggctaacattatccggcttttgcttcggagctaaccgtgattcagaccttttttgattttcccgtttacttcaaatttttcatcgggttatttgcgctggtcaacccggtagggattattcccgtctttatcagcatgaccagttatcagacagcggcagcgcgaaacaaaactaaccttacagccaacctgtctgtggccattatcttgtggatcagcctttttctcggcgacacgattctacaactttttggtataagtattgatagcttccgtatcgccgggggtatcctggtggtgacaatagcgatgagcatgatcagcggcaagcttggcgaggataaacagaacaagcaagaaaaaagtgaaaccgcggtacgtgaaagcattggtgtggtgccactggcgttgccgttgatggcggggccaggggcgatcagttctaccatcgtctggggtacgcgttatcacagcattagctatctgtttggtttctttgtggctattgcattgttcgctttatgttgttggggattgttccgcatggcaccgtggctggtacgggttttacgccagaccggcatcaacgtgattacgcgtattatggggctattgctgatggcattggggattgaatttatcgttactggtattaaggggattttccccggcctgcttaattaattcctttcaaatgaaacggagctgccatgctccgtttacttcgtcattatttttactttgttcccgcgcagttatcaaaagcaaaaggaataggtaaaaatattcttctcaaattacagttagttataaggatttccttaactgcttctcctcaccatcatgttattttcgccacatcataatcctgggcttgctgaagaataattgaaatgatattattaattccactgcctttggtagaggaaagtgctaaataataatcaattgttaaattattgtgcatttcactactggaactgtaatcagaaaagatagacatgcttagccaatctctatttgattgaattgaaagatgtttgttaaggcatggatgcaagctatagattctgatacggtcaataaaagagaattgcttaacaattttgcaaaatgtattggcgagtaagaaccgcatttggtactttccgggcaaccgccagacgattctttattggtaatgagaataattaacaattaaagagcgtcgcgaaagaataatgtgtctcgacaggggagacacagtacgaatcgacataaggtgatcgtctgaatcaccagaataaataaagtcggtgatagtaatacgtaacgataaagtaacctgacagcagaaagtctccgagcctgtgcagggtcccaatccgggattacacatgctggttaataccagtaattataatgagggagtccaaaaaacaatgaccaacatcaccaagagaagtttagtagcagctggcgttctggctgcgctaatggcagggaatgtcgcgctggcagctgatgtacccgcaggcgtcacactggcggaaaaacaaacactggtacgtaacaatggtagtgaagttcagagtttagatccgcacaaaattgaaggtgttccggagtctaatatcagccgagacctgtttgaaggcttactggtcagcgatcttgacggtcatccagcacctggcgtcgctgaatcctgggataataaagacgcgaaagtctggaccttccatttgcgtaaagatgcgaaatggtctgatggcacgccagtcacagcacaagactttgtgtatagctggcaacgttctgttgatccgaacactgcttctccgtatgccagttatctgcaatatgggcatatcgccggtattgatgaaattcttgaagggaaaaaaccgattaccgatctcggcgtgaaagctattgatgatcacacattagaagtcaccttaagtgaacccgttccgtacttctataaattacttgttcacccaagtactagtccggtgccaaaagccgctatcgagaaattcggcgaaaaatggacccagcctggtaatatcgtcaccaacggtgcctataccttaaaagattgggtcgtaaacgaacgaatcgttcttgaacgcagcccgacctactggaacaacgcgaaaaccgttattaaccaggtaacctatttgcctattgcttctgaagttaccgatgtcaaccgctaccgtagtggtgaaatcgacatgacgaataacagcatgccgatcgaattgttccagaagctgaaaaaagagatcccggacgaagttcacgttgatccatacctgtgcacttactattacgaaattaacaaccagaaaccgccattcaacgatgtgcgtgtgcgtaccgcactgaaactaggtatggaccgcgatatcattgttaataaagtgaaagcgcagggcaacatgcccgcctatggttacactccaccgtatactgatggcgcaaaattgactcagccagaatggtttggctggagccaggaaaaacgtaacgaagaagcgaaaaaactgctggctgaagcgggttataccgcagacaaaccgttgaccatcaacctgttgtataacacctccgatctgcataaaaagctggcgattgctgcctctagtttgtggaagaaaaacattggtgtaaacgtcaaactggttaaccaggagtggaaaacgttcctcgacacccgtcaccagggtacttttgatgtggcccgtgcaggctggtgtgctgactacaacgaaccaacttccttcctgaacaccatgcttagcaacagcagcatgaataccgcgcattataagagcccggcctttgacagcattatggcggaaacgctgaaagtgactgacgaggcgcagcgcacagctctgtacactaaagcagaacaacagctggataaggatagcgccattgttcctgtttattactacgtgaatgcgcgtctggtgaaaccgtgggttggtggctataccggcaaagatccgctggataatacctatacccggaatatgtacattgtgaagcactaatggcaatacgtggggcaggagtgtcctgctccacggtgtctgatttttatcgcattacagaaggcacaggccagaaggtagggcaatgttaaaatttattctacgtcgctgtctggaagcgattccgacgctatttattcttattactattagcttctttatgatgcgcctcgcgccgggaagcccttttaccggcgaacgtactttaccgccagaagtgatggccaatatcgaagcgaaatatcatcttaatgatccgatcatgacacagtatttcagctacctgaaacaactggcgcacggtgatttcggtccaagctttaaatataaagattatagcgtcaatgacttggttgcatccagttttcccgtttctgccaaactgggagccgcagcatttttccttgcggtaatactgggtgttagtgctggcgttattgccgcattaaaacaaaacaccaaatgggactataccgtgatggggctggcaatgaccggggttgttatccccagttttgtggttgcaccattattagtcatgatatttgcgatcattttgcattggctgccgggcggtggctggaatggtggggcgcttaaattcatgatattgccgatggtggcgttgagtctcgcttatatcgccagtattgcgcgtattacccgtggctctatgattgaagtattacactccaattttattcgtactgcccgggcgaaagggttacctatgcggcggatcattttacgtcacgcattaaaacctgctctgttacccgtgctctcttatatgggccccgcatttgtcggcattattaccggttctatggttatcgaaaccatttatggtttgccggggattggacaactgttcgttaatggcgcattgaaccgtgactattccttagtgttaagcctgaccatcctggttggtgctttaaccattttgtttaatgccattgtcgatgtgctatatgcggttatcgacccgaaaatccgttactgatactggagctcgcgatgatgttaagtaagaaaaacagcgagacgctggaaaatttcagtgaaaagctggaggtcgaagggcgcagcttgtggcaggacgcacgtcgacgttttatgcataaccgtgcggcggttgccagtctgatagtgctggtgctgatcgcgttatttgtaatcctggcaccgatgctttcccagtttgcctatgacgatactgactgggcgatgatgtccagcgccccggatatggagtccggtcactactttggtactgacagttccggtcgcgacctgcttgtgcgcgttgcgattggcgggcgtatcagtctcatggtcggtgttgctgcggcactggtggctgtggtcgtcgggacactttatggtagcctttccggttatctgggcggtaaagtggatagcgtaatgatgcgtctgctggaaatcctcaactccttcccattcatgttcttcgtcattttgctggtgacctttttcggtcaaaacatcctgctgattttcgtggcgataggcatggtttcctggctggatatggctcgtattgtgcgtgggcaaaccctgagtctgaagcgcaaagagtttattgaggcggcacaagttggcggtgtaagcacaagcggcattgttattcgccacattgtgccgaatgtactcggtgtggtggtggtctacgcaagtcttctggtgcccagcatgatcctctttgaatctttccttagcttcctggggttgggtacgcaagagccgttaagcagctggggtgcattgctgagtgatggcgcgaacagcatggaagtctctccatggttattgttgttcccagcgggattcctcgtggtgacgctgttttgtttcaactttatcggcgatggcttgcgtgatgccctcgacccgaaagatcgttaaggagtgcagccatgagcgtaattgaaactgcaactgtgccgctcgcacaacaacaggctgacgcactgctgaacgtgaaagatttgcgtgtcacctttagtaccccggacggcgacgtcacggcggtcaatgatttgaatttttccctacgtgccggagaaacgctgggtattgtaggtgagtctggtagcggtaaaagccaaactgcatttgcgttgatgggcctgttggctgccaacggacgtattggcggaagcgcaaccttcaatgggcgtgaaatcctcaatttgccagagcatgaactcaataaactgcgcgctgaacaaatcagtatgatttttcaggacccaatgactagcttgaatccctatatgcgcgtcggtgagcagttgatggaagtgctgatgctgcataagaacatgagcaaagctgaggcgtttgaagagagcgtgcggatgctcgatgcggtaaaaatgccggaagcgcgtaaacgcatgaaaatgtacccgcacgaattttctggcggcatgcgtcagcgagtcatgattgcgatggccttgttatgtcgacctaagctgctgattgcggatgaaccaacaactgcgctggacgtcaccgtacaggcgcagatcatgacgctattaaatgaactgaagcgggaatttaataccgccatcattatgatcacccacgatcttgtcgtggtggcggggatctgcgacaaagtgctggtaatgtacgccgggcgcacgatggaatatggcaacgcgcgcgatgtcttttatcaacccgttcatccttattctatcggtttgctcaacgcggtgccgcgtctcgatgcggaaggtgaaacaatgttgaccatcccgggtaatccgccaaacctgctgcgattaccgaaaggttgcccgttccagccacgttgtccgcatgcgatggaaatttgtagtagcgcaccgccgctggaagagtttacgcctggccgtctgcgtgcttgctttaaaccggtggaggaactgttatgaatgctgtaactgaaggaagaaaagtcctccttgaaatcgccgatcttaaagtgcactttgaaatcaaagatggcaaacagtggttctggcaaccgccgaaaacgctcaaagccgtcgatggtgtcactcttcgcctgtatgaaggggaaacattaggtgtggtaggggaaagcggatgcggtaagtccacctttgctcgcgccatcatcggtttggtcaaggcgaccgacggtcatgttgcctggttaggtaaagagttgctgggcatgaaacccgatgaatggcgtgccgttcgcagtgatattcagatgattttccaggatccgttggcaagcctaaacccgcgtatgaccatcggcgagatcatcgctgaaccactgcgtacttatcatccgaaaatgagtcgccaggaagttcgcgagcgcgtgaaggcgatgatgctgaaagtcgggttattgcctaacctgattaaccgctatccgcatgagttctctggtgggcagtgccagcgtatcgggattgcgcgtgctcttattcttgaaccgaagctgattatctgtgatgagccggtgagcgcgctggacgtgagtattcaggcacaggtggtcaacctgctccagcaattgcaacgtgagatgggattgagtttaatttttatcgctcatgacctggccgtggtaaaacacatttccgatcgtgtgttggtgatgtatctcggccatgcggtagaactggggacctatgatgaggtctaccacaatccactacatccttacaccagggcattgatgagcgcagtccccatacctgatccggatctggagaagaacaaaaccatccagttactggaaggggaattaccgagcccgatcaacccgccttccggttgtgttttccgtacccgttgcccgattgccggtccagagtgcgccaaaacacgtcctgttctggaggggagtttcagacactccgtttcttgcctgaaagtcgatccgctttaaaaacaataagggctgacagttgtcagccctttttcacgctaaaagcgattatttattcccgccagatgatatggcaaagtttgtgatctttttcgcggcataacagaatgcgggcaaaaacatcgttgatttcaccatcttcactgtccgccagaccaatcaccacttcggcaaaaaagtccgggttcaaatcgaaatcaacatgttcctgccagtcttccgccggatcgaataactccgcgccgccgcgctcttcaaactgaagattgaacagcagaacatcagctggatcgagattgtcggcagccagttcgagaaaaatatcgtaggcctgttcaagcgtttcatcttcagtcaggcgattgtttagatccatatccatagttactacctgtttaacctctgttggcgacgttttacagcaacggactgaagaagtaaaacagtcgctcggcgacacgttgccataatggacgttttagccataaacgggcatcgagcagacgactacggctaatataatcgtcctgaacggcggcgaggtcagcaccaaaacctttatcgtcgattgccagggtaatctcgaaatttagccacagactacgcatatcaaggttaactgtgccaaccagacttagttcgccatcgaccagcacgctcttggtatgcagtaacccgccttcaaactgataaattttaaccccagcagccagcagttccgtaaagaatgcgcgactggcccagccgaccagcatgctgtcattttttcgcggaaggataatactgacatccaccccgcgctgcgccgccgtgcaaatcgcatgaagtaaatcatcgcttggcacaaagtagggcgtggtcatgatcaaatattcacgcgcgctataagccgcagtcaataatgcctggtgaatgagatcttccggaaagccggggccagaagcaattgtgtgaatggtgtgaccgctggcctgttcaaacggcataatattgacatctggtggtggcggcagaatacgttttccggtttcaatctcccagtcgcaggaataaataatccccatcgcggtggcgatagggccttccatacgcgccatcagatcaatccattgccctacgcccgcatcttgtttgaagtagcgaggatcgaccatattcatgctgccggtgtacgcgatgtaattatcgatcatgatcatcttgcgatgttggcgcaggtccatacggcgtaaaaacacacgcatcagattgacctttaaggcttcgaccacttcaataccggcattacgcattagctcgggccacgggctgcggaaaaaagccacactcccggcggagtcgagcatcaatcggcaatgaatgccgcgtcgcgcagccgccattaaactttcagccacctggtccgccatgccgccgggctgccagatataaaacaccatctcaatattatggcgcgcgagctggatgtcgcggattaacgcctgcatcacatcatcactctcggtcatcagttgtagctgattccctttgaccccagcgatcccctgacgacgctcgcaaagcttgaataatggcgcagcgacactgctattttcttcggcgaagatatgcttacaggctttaaggtcgttaagccattttgcggtggaaggccacatcgctctggcgcgctcagcgcggcgtttgcctaaatggagctcgccaacggcaagataggcaataattccgactaacggcagaatgtaaataatcaacagccaggccatcgcggagggaactgcgcgtcgtttcattagaatgcgtaaagttacgcctgcaatgagcaaccagtatcccagaatggccaaccaactcaccaacgtataaacggttgtcatagattagaaatccttttgaaagcgcattgttatgagtttacgcatatggattcatctggcaaataaaaacgcgggaaaagcactggtcagcgtcgggggtgggggtataatgaccattctgttattgcatagagtagttaacatgaagcggagtagaacggaagtggggcgctggcgcatgcagcgtcaggctagccgacgtaaatcgcgttggcttgaggggcaatcgcgccgaaatatgcgtatccacagcatcaggaagtgcattctaaacaaacagcgtaactcgttattgtttgcgatctacaatatctaaatgtactgggcaccattgcggtgcccaataagtttactcttccgtctttaaactttatttttgcgcgctttctttactgtcagctttcgtttctagttcatcgttatcgctgaaaataccatgaccactgttcaacaacatactaacgagcatatcattattaatctcttcaccatttaaaactcgcgccagaatttcgctgccaaacagttgcggactgagaatgatatccggatgtaccatcttaatcttattcaggtttttgctatcactgacggcgagaactgttttgacatcactgctcatatcttttgcgctgagtacaacaaacgcgttatctgcatcgttatcactcagcgccagaatggcccggcaacgatcgattcccgctttctttaatacagaactgtcattactgtcaccggggataacatcagcattatcgcctaagcgttgctcaagttgcttgatatcatcttcaggcaagttgctgataaccgttacgttttgtccgcgttgattcagttgcaggatcgtattgatggcgagaatgctatgtccgcaaacaataaaatgatctttacgatgcattgtatgattgtttccttttacaagtttgttgaatcccccgcggataagcggaccaaaaatactggtcatagatgtggcaaaaacggtaatgccggaaataatgacgctaatagtgaacaatcgtgcactttcagaaacagggacaatatcgccatagccgacggtactcatggtttctatgctaaaatagaacgcggtcatcaaactttctattcgcggattaaaaccttcgcttaaataaagcgcaccgtaggtactgtaaaacagtaatgtcgtgaaactaataaatgcaaaaattgtcccggctgcggcgctactgtgggagaagtctttgcgcagtatcagcaaaaacaccagcgtaaaaatgcaaaatccaatactaaatttcagccagggataaaaatgcagggtgtaaattagcgctatcaacaacaaaatgatactgattgcccatgcgagctttgcccggaacagtaagccaatggagttcaggacaagaaagacgccgagcataaagagtggggcgtttgccagcaaggagagatccaactcactaaatgctttgatatggaaaatatcaagcaaattgacgctcataccatagattgttttaaaaataagcaatccatttaaaaagacggccagcgcgagaatgtcgtgccgaagggtcacccataaatttgttgctgtttgtttgaatgtagcccagtgactcactgatacctctgtaaccacaattttgtttaattatcttagcgtgcacattttctgaacatacatgcagcgcgtgaatgtgttaaacaatagtagatgactttatccgcagtaatcaaaggatttgagcgagcaactgtacctcaggaaaggtcatttttcctgaatatgctcacatcatataaagaaatacagataaagttattatctgcttgtggtggtgaatgcactgaccggctataaggaaaggccaaacaagaacacggttgcaaaaaccgtgcccttaaatattgaatctctattcagaacactttcttaaatggtttcacactaacgtgttcatagactcctgccgctacgtacgggtcagcatcggcccaggcctgagctgcttccaggctttcaaattcagcaataacggtactgccagtaaatcccgcagcccctggatcgttactgtctaccgctggcattggaccagctgtcaacaaacgaccttcatcatgcagtaactgtaaacgtgctaaatgtgccggacgaacggaaaggcgtttttcgaggctatcagctttgtcttgagcgtaaataacatacaacacgggcacaactccttgttcgggaaagttgtaaagtacgttatttgaaagggcgaagatctgcaacggaaagatgatgtctttgttaaggccatgcataaagtaagggtaattacgccaaaaatgacattttcactgatcctgatcgtcttgccttattgaatatgattgctatttgcatttaaaatcgagacctggtttttctactgaaatgattatgacttcaatgacccttgatttacctcgccgcttcccctggccgacgttacttagcgtctgcattcatggtgctgttgtggcgggtctgctctataccagcgtacatcaggttattgaactacctgcgcctgcgcagccgatttctgtcacgatggttacgcctgctgatctcgaaccgccacaagccgttcagccgccaccggagccggtggtagagccagaaccggaacctgagccgatccccgaaccgccaaaagaagcaccggtggtcattgaaaagccgaagccgaaacctaagccaaaaccgaagccggtgaaaaaggtacaggagcagccaaaacgcgatgtcaaacccgtagagagccgtccggcaagtccgtttgaaaatacggcaccggcacgcctgacaagtagtacagcaacggctgcaaccagcaagccggttaccagtgtggctagtggaccacgcgcattaagccgtaatcagccgcagtatccggcacgagcacaggcattgcgcattgaagggcaggttaaagttaaatttgacgttacgccggatggtcgcgtggataacgtacaaatcctcagtgccaagcctgcgaacatgtttgagcgtgaggtgaaaaatgcgatgcgcagatggcgttatgagccgggtaagccaggcagtgggattgtggtgaatatcctgtttaaaattaacggcaccaccgaaattcagtaagcagaaagtcaaaagcctccgaccggaggcttttgactattactcaacaggtaaggcgcgaggttttccttcaggatcaaccgcgacatacttaaataatgcttctgtcgctttatagcgttgcccaattggttcagacgctacttttttcacccacacttcaatattaatgctgacgcttgtcgtccctttctggacacagcgtgcatagcagcacaccacatcgccgaccgcaaccggccgtaagaaagtcattccttcaacccgcacagtcactacgcgaccgtgggcaatttcttttgccagaatagcgccgccaatatccatttgactcattaaccaaccaccaaagatgtcaccattggcattggtatcggcgggcatggctaaagtacgtaaaacaagatcgccctgagggacgttatgtgttgtagacatggtaaaaccgacttaaaaggaaaatcacaggcgcgatgctactatgattttcctgaggagaacagaggagatacagcgccagccccgaaggactggcagtctggttaggatttatcttcctgcggcatgtggcggtagatatagataccgcttaacaatgtgaagattaaggtaagggcggtcaggccaaagactttaaagttgacccaaatattttgcggcagccagaatgcgatgtagatgtttgccagaccgcaaaggataaagaaaacagcccaggccagattcagcttgctccataccggttgcggcagcgtgagttctttacccagcatccgctgaattagcggctttttcatcacccattggctgactaacagggctcccgcaaatagagcataaatgacagtaaccttccatttaataaactcatcattgtggaagaacagcgtcaagccaccgaagacgaccaccagaacaaaagtgatcagggccatcttctcaaccttacgaaagcgaacccagctatagataagcacaatcgccgtggcgacgatcagcgccgcagtagccgcatagatgtcataaatcttgtaaaacgcgaaaaagacaaccagcggtaaaaaatcaagaaactgcttcattttacgattccgtaatcaaatgcttaaggttattggcgaatcaacatatacaggcggaacagatagatgagcaatatggcactaatcaggttgctcaaggtgttcgccagtacggcaccaatttccggggttaatgcggcaaaagaagaggcaaaaagcagcaacagtgtttttgccagcaaccagctcagtactgcgggtgccaccagacgcatattcgcccaagtcagccgcatactgctacgcatgctggcaaaaacgcccattttgtcctgtaccaacatcaccggtgccagggccagtaaaatggccatgataattcccggaacgaccaccagcatgatgccaatctgtactaaaagggtagtcagaaaaatcagaataaataactttggcaatatcggcgcactggcaccaatagctcgcagcgcactgactctctgacccgcagacaccagctggataattaatattacgcctccggcgagaatggcgttaccgattaatccactaaaagtggacgccgcactagcctgcagcaaaatttgttgctgttccggactcatattctgaaccaggtcgaacaacccactactgccgctaacgggcacgccgtcattgagctgcgcaagctgtgcatcactgggactgaaaacatgccctaacaccactgtgataaacgcacatagcaagcttaccaacagaatggtcataaattgattacggaagaaatttccggtgtcacggtatacggactgcgccgtgatagacatgcactctccttgagttttatgcaggtgttaattagcgggcaattgtaccctggttaagcctcgggtggcagcatcaggtcttgtatggaaaagcatatctttgtaaagcggaggtaattgctggccttcaggcatgggcaaatcgcggcaagtggcgaccgagttaatatttgcgtagcgaaaatatttaaaaattgatttaaatcacattaaccaggattctcaatgcaacttctaaattaatccagatcaataaagggtgaattatcatatgtaatgtgatctatgtaggatcatttgttactccaatgtaggtatattcgtcacgtttttataaccataacgacggagcggatatgaaaaagttaacagtggcggctttggcagtaacaactcttctctctggcagtgcctttgcgcatgaagcaggcgaattttttatgcgtgcaggttctgcaaccgtacgtccaacagaaggtgctggtggtacgttaggaagtctgggtggattcagcgtgaccaataacacgcaactgggccttacgtttacttatatggcgaccgacaacattggtgtggaattactggcagcgacgccgttccgccataaaatcggcacccgggcgaccggcgatattgcaaccgttcatcatctgccaccaacactgatggcgcagtggtattttggtgatgccagcagcaaattccgtccttacgttggggcaggtattaactacaccaccttctttgataatggatttaacgatcatggcaaagaggcagggctttccgatctcagtctgaaagattcctggggagctgccgggcaggtgggggttgattatctgattaaccgtgactggttggttaacatgagtgtgtggtacatggatatcgataccaccgccaattataagctgggcggtgcacagcaacacgatagcgtacgcctcgatccgtgggtgtttatgttcagtgcaggatatcgtttttaattccgcacaaaaacgaccccgtaatatacggggtcaataaggacatggtataaagggtattatttcttcgcttctacgccatcagtttcagagcgaattaaaaatttctcagttgtttgcggaatattctgaatcagccagtcggccatttgcttttcctcatttaaaatcgcttcgatggttggaatactagctgtatcaccggcattttttgctgctgctaatagactggtgtaacaggcgatttcaaattgctcgaagacatatccgctaatagagcctttgactatttcatcagaagggaatataccaccgatactctgcccaagcgcagccattttactcatggaatctttaatgacactacgactaatgtcattacgatcaagaatagtttccagttgaacaatctggtttttggtttcactaagatgttgttcaatacgagcgcgtagttcaggataattatctatacggctggccatggattcaagcatagattcggcttgcttttccattgcgtgggcgtcacgtaaccagtcatgataatgttcaatacgattcatgaaaatgtcctctttataaaatgactaaaagttaaaattcatatttcaggctttattttcggctttcttatttacgttattaatggccagatcagtcagtttgatgtcggtggccttttcttcttccagggtttctttcagaagcttcgctgctttacggtaacctaattgttcagccagcgtcgctaatgtcccgtaactggcaatctcataatgctcgactttctgtgctgcggcaatcagtgcggcatcacgcacttcgtttttctcggtactttcgatgacctcattagcttcttcaataagaccttccattgccacacatttcatgcgcttaattttcaggttgctttcggactccacaacttgatcaatacgttcaatctgtccatgagtttcctcgaggtgcgcatgaaaagcctgacttaatttttcattacttgttgctcttgcgagttttgccagtgcccgggttaattgtttttctgcgctgtaggtatcactaagcaggtgaataaatacatcttcaatggtcttcatattcatatttttctccagtgaaatcactgcgagccatacggcccgcagatgcaattatctttatcagctgatattaataattaacggtgaatcaggatttgccacttttattaccaccgctttgttgaccgccttttttacccgcttcagatgcgcgttgcggatcatttttaaaattaccgccgctatgctgaccgcctttacggcctgcgtcggatgccttctcacggtcttcggcgaaatttccactaccaccacgatgttcggccatgttatttctcccgttgcgttgcattgtttcattaatatgagtgttgtgtgtcgacactcattaaaattagtcgctaatgagaattagtcaaattaagcgcaacgagaagatagagggaaaatatattttgaggaacattctggatatattaacaattacctgaggaataagtgacttagagaaaattattgattttactggtgttatgttgcgggattaatttgtttgattatattactgttgggcggaaaaatgacgtaagttgacgttcgaccggggtaagcgaaacggtaaaaagataaatattaaatgaatttaggatttttccggcttcattaaagaaagttaaaatgccgccagcggaactggcggctgtgggattaactgcgcgtcgccgctttcatcggttgtacaaaaactttcagtgccgccagcattttctctggctcattaatatgttgctcgatgattttaacaatggcgctaccagaaatcgcgcccgcagctcctgcatcaatcgctgcttttacctgatccggggcggaaataccaaatccctgcaatggaggtgcagcgttgtactctttcagcttcgcaaccagatgattgaggggtaacgcggcgcggttttctgcgccggtcacgcctgctcgactcagcaaataggtgtaaccacgaccgtaagaggctatctggcgcagcaggtcgtcatcggcatttggcgggcagatgaagataggtgcgacattatgacgcaacgcggcctggcggaagggcgcggactcttcaactggcacatcggcaaccagcacgctatcgacgccgactttttcgcactgggcataaaactcatcaatgcctttgttaaacaccagattggcatacatcaacaggccaatgggaatggtcgggtgtttctggcgaatcagtgccagcatttcaaaacattgtgccggagtcacacctgccgcaaaggcgcgcagagtggcgttttgaatcgtcgggccatccgccagtgggtcggagaaggggatacctaactccagcgcgtcagcaccggcttcaattagcgtatcgataattttcaaactctgctcaatgcccggatcaccgagcgtgacgaaaggaacgaatgcgccttctttgcgctccttcaactgggcaaacagagattcgtagcgttccatcagatttcccctcgtgctttcaaaatatcgtgaacggtgaagatgtctttatcgccgcgaccggaaaggttaaccaccagtagctgctctttatccgggttttcgcgcatcattttcaacgcatgggccagggcgtgggaggattccagcgccgggatgatcccttcgtgcaggcacagcgttttgaaggcttcaagggcttcatcatcggtaatagacacgtaatcagcgcgtccagtgctgttaagatacgcgtgttgtgggccgacagacgggaaatccagtccggcggagatggagtaagattcttcaatctgcccgtcttcggtttgcatcatcggcgctttcataccgaaatagatacccacgcgaccatgttttagcggtgcgccgtgctcgccagtttcgataccgtgaccacctggctccacaccaatcaggccgacgttggtttcattgatgaaatcagcaaacatgccgatggcattgctaccgccgccaacacaggcgataacggcatccggcaggcgaccttctctttccagaatctgcgctttggtttcttcgccaatcatccgctgaaactcacgcacaatggtcggataaggatgcgggccagctgcggtgcccagcatatagtgcgcggtttcgtaactaccggaccagtcgcgcagcgcctcgttacaggcatctttcagcgtcgcggaaccgctatgcaccgggatcacttccgcacccattaagcgcatacgaaaaacgttagggctctggcgttcaacgtctttggcacccatataaatacggcatttcaggccgagcagggcgctggcaagggcgctcgccacgccatgctgaccggcaccggtttcggcgatgatttcggttttacccatccgcttcgccagcaacgcctgccccagcacctggttagttttatgcgcgccgccgtgcagcaaatcttcacgcttgagatacagcgtggtgttcgtcccggctgtaatgttctggcatttggtcagcgcggttggacgcccggcatagtttttcagcaggtcgttgaactgagcctgaaattcaggatctttttgcgcactgacaaaagcttcttccagctggcgcagagcaggcatcaggatttgtggcacgtacatgccgccaaactcaccaaaataggggttaagtaatgttgtcattgttcctttccttaatatgcgcgcagcgtctggaaaacgctggccaaaagacgtgcgtctttgatgcccggttggctctctacagcagaattaaaatcaagtccggcgcagccggtttgtgccgcttccacgcagttatctgcgcctaagccccccgccagcagaacgttgccaaggctttgaccatttaatagactccagtcaaaacgttgcccgcttccaccctggccgttgtctaaaacatatttatcaacgtgctgaaactcgcgggcgggcagggtttcaccgacgcttaatgctttccagatggcaacatgtgctggcagagcttcacgcagcgtatcgatatacagctgttcttcattaccatgcagttgcactgccgccaggcttaacaccttagctttgtccaccacatcggcaatatcgtgattgcggaacacgccaacatactgcaacggtgccgcagccatcacttcctgcgcctgttcaacgttgacgcaacgcggacttgtcgcaacaaaaatcaacccaccgtaaatcgcgcccgcgtcataagctgctttagcatcttgcccacgcgtcaggccacatactttattctcacccagcaacacccggcgcacggcggcgtgcaaatcgtcatgggccatcaacgcgctaccaatcagaaaaccgttagcgaagtggcttaactcgcgcacctgagcgtaagtattgatgccggattcgctgattaccgtcacgttgtgccccagtttcggcgcaagctcgcgggtacggttgagatcaatgctcaaatcacgcagatcgcggttgttgatgccaacgacctttgctcccaatgcaatggcgcgctcctgttcctcttcattactgacttcggtcagcacccccatctccagactgtgagcgacggcggcaagctggcgatattggtcgtcatccagtacactaagcattaataagcaggcatcggcctggtaatagcgcgccagatagatctggtaagggtcgataatgaagtctttacataaaatcggctgcggggcgatttggctgacgatggggaggaaattaaagctcccctgaaaatatttctcatcagtcagcacgctaattgcgctagcgtaatgtttataaatggcggcaatgcgtgctggatcgaaatcatcacggatcacgcctttactcgggctcgctttcttgcactccagaataaacgccgtgcgcgcaccctgtagcgcatcataaaaatgtcgcgtgctcggctgaacctcattctgaaaactggccagcggttgctgctgtttgcgggcttctacccaaatcgccttgtctgcgacgattttcgctaaaacggtttgcatcatttaccctcgtgccgccagtgcggtgactctgtcgtaagcggaaccactgcgcagtacctcaagaacggtttgcgcattggcttgcagatcttcatggccatgcaggcgcattaacatggcgacgttcgcagcgacggctgcttcatgggcggcgtcgcctttaccttgtaacaaacgtgttaaaatgtcacggttttcttccggtgttccgcctgccagttgctcctggtggtagggtgtcaggccaaagtcttctgcggtgagctgatagcttttaatttcgccgtcatgcagttcggcaacgattgtcggcgcgtgtaaactaacttcatccatcccgccgctgtgcaccaccgccgcgcgttgataccccagcacgcgcaaggtttcggcaatcggcagcaccagttccggactataaacaccaattaacgccagcggcggatgcgccgggttaatcaatggccccagcacattgaacagggtgcgggttttcagttgctggcgaaccggcatcgcgtggcggaatccggtgtgatacttcggcgcaaagaggaaacatacacctaactcatccagcgcctggcggcttttatcggcgttcatatcaagattaataccgaacgccgccagcagatcggagctaccagatttactggagacgctacggttgccgtgtttcgccactttcagcccacaggccgcggcgacaaacgcactggcggtagaaatattgatactgttgctgccgtcaccgccagtaccgacgatatcagcaaacagataatccgggcgcgggaacggcgctgcgttttccagtagcgcggttgctgccccggcgatctcgttcgggtgctcaccgcgaattttcatgctcaccagcgccgccgccagttgttccggcttcagctcgccacgcaccaccgcactaaacagctggtggctttcttgttggctaagcgtctgcgcctgatacagtttttccagaatcggttgcagcgtgttggctggctctagtttctgctgcgcccaggccagcgtttgttccagcaggcgagcgccctgggtggtgagaatggattccggatggaactggaatccacaaacgcgatccgcatcgtgacgtactgccatcaccatgccattaaaatgggcgttgatggttaaaccggccggaatgttactgccaaccaggctgtgataacgcgccaccggcagcgggtttgttaatccggcaaacatcgcctgaccgtcatgttcaatgctggaggctttaccgtggagaatttcgcccgcctgaccgacatagcccccgtaagcttcgacaatcgcctgatgtccgaggcaaatgccaataatgggcagcttgccacgcaagcgggtgaggagttccggcatacaaccggcttcgctcggcacaccggggccaggagaaagcatcagcaccggattgctcatggtcgccaggcgttcaattaaggtttgcgccggaatatggttgcggtaaatcaccacgttatgcccattgctgcgcaactgatctgccaggttgtacgtaaaagagtcgatattatcgagcagcagaatgtcagccatcagaaagtctcctgtgcatgatgcgcggtggcaatagcgcgcagtacagcgcgggctttgttacgggtttcgtcggcttcgctctgcggaacagaatcaaggactacaccagcacccgcttgcacggtggcgataccgttttccaccagcgcgctgcggatcacaatgcaggtgtcgagatcgccatgcgcggtgaaataacctaccgcgccgccgtagctgccgcggcgacgaccttccgcctcggcaattaactgcatagcgcgtactttcggcgcaccgcttaacgtccccatattcatacaggcgcgataagcgtgcagggcgtcaagatcgtgacgcagttcgccgactacgcgagagacgaggtgcatcacataggaataacggtcaactttggtgagatcggcgacgtagcggctgccgggggtgcaaatgcgtgccagatcattacgggcgagatcaaccagcatcagatgttcagacagctctttatgatcggtacgcatttccagttcaatacggctgtcgagatctctgtccagactaccatcggcgcgacgaccgcgtgggcgtgttccggcaatcgggtagatctcaatctggcggctggtggcatcatacttgaggctgctttccgggctcgcgccaaatagggtgaaatcattatcctgcataaaaaacatgtacgggctgggattactctttttcagcacgtaataggccgccagcggactcgggcagggcagagagaaacggcgagatggcaccacctggaaaatttctccagcgcgaatcgctttttgcaacaaacgcactacgccaccgaactcttcatcgctctgattacattcacaacgcatatgcggcacggaaaccactggcagcggcggcgcggcttcggtcagttgctgacgtagttcgttcaggcgagcagtgagacgttgtttttcttcttcattcggagcaaacaggctggcctgaatacgggtgctttttttctgatggtcaatcaccatcagcgtttcagcgagataaaaacagaaatcagggcagttattttccgcactcagttgcggtaaatcttcaaatcccgccacaaggtcataagagaacaggccgccgaagaacatggcttctcgttcttccttcggtacattcaacagattctgcaataaacggaaagcgtcaaaaacgctaagggagcataagcgggcgtcttcatccagcagtggactgacaggggggaagcgcagcacacggcagtttggactttgttcactttccacacccgcaggcagggcgttatccagtagtgccaggagggcttcgccgttgccggaaagtgcctggattgtgacagtgtcacctaaagctgtaatgcgcagcgcactgtctaccagcagcaggctttttaaatcatctttgctgtcgatatctgcggattccagcagcagcgttgccggacgatccccacacaactggtgaaaaagcgcggtgggattgtcgcgataagcgccttcgcaggttagcagttcgagagtcggtttttgtgtttgcattgttattctctaattttgttcaaaaaaaagcccgctcattaggcgggctgggtatctgattgctttacgcatggtgaatacactgcccgtttcaggaagtgcgccaccaacctttcagtacgaaaattgctttcattgtcgataccctttttacgtgaacttgcgtactagttaactagttcgatgattaattgtcaacagctcatttcagaatatttgccagaaccgttatgatgtcggcgcaaaaaacattatccagaacgggagtgcgccttgagcgacacgaattatgcagtgatttacgacctgcacagccataccacagcttccgatggctgcctgacgccagaagcattggtgcaccgtgcagtcgagatgcgcgtcggcaccctggcgatcaccgaccatgacaccacagctgcaatcgcgccagcaagagaggaaattagtcgtagcggactggcgttgaatcttattcccggcgtggaaatttccacggtctgggaaaatcatgaaattcatattgtcgggctgaatattgatattactcatccgctaatgtgtgagttcctcgcgcagcagacagaacggcgcaatcagcgggcgcagctgattgccgaaagacttgaaaaagcgcaaatacctggggcgctggaaggcgcacaacgactggcgcagggcggcgcagtgacgcgcggtcattttgcgcgtttccttgttgagtgcggcaaagccagtagtatggcggatgtctttaaaaagtatctggcgcgcgggaaaaccggatacgttccgccacagtggtgtacaatagaacaagctattgatgtcattcatcattctggcggtaaggcggtgctagctcatcctgggcggtacaatcttagtgctaaatggctgaaaagattggttgcgcattttgccgaacaccacggtgacgcgatggaagtcgcgcagtgccagcaaagccccaatgaacgtacccagctggcggcccttgcgcgtcagcatcatttatgggcaagtcaaggatctgattttcatcagccatgcccgtggatcgaactgggtcgtaaactctggctgcccgcaggcgttgaaggcgtctggcagctatgggaacagccgcagaacaccacagagagggaattatgagccagtttttttatattcatcctgataacccacagcaacgtctgatcaaccaggcggtggagatcgtgcgtaaaggcggggtgattgtttatccaactgattccggctatgcgctcggctgtaaaattgaagataaaaacgcgatggagcgtatttgtcgtattcgccagctgccggacggtcacaactttaccctgatgtgtcgcgatctttctgaactcagcacctatagttttgttgataacgttgcgtttcgtttaatgaaaaacaacacgccgggcaactataccttcatcctgaaggggacgaaggaagtgccacgccgtctgttgcaggaaaaacgcaaaaccatcggtatgcgtgtgccttctaaccctatcgctcaggcgttacttgaagcattgggcgaaccgatgctttccactagcctaatgctgccaggcagcgaatttaccgaaagcgacccggaagaaattaaagatcgtctggaaaaacaggtagatttgattattcacggcggctatctcgggcagaaaccgacaacggttattgatcttaccgatgatacgccggtcgtggtgcgtgaaggcgtaggtgatgtgaagcctttcttataacaaattgcgttccacggatggaagactatggcagggaagtttcgctgcattttgctgttgatagcagggctgtttgtaagttctctaagttatgcagaaaacacggagatcccttcttatgaagaagggatcagcctctttgatgttgaagccactctgcaaccagatggggtgctcgacatcaaagaaaatattcattttcaggcgcgaaatcagcagattaagcacggcttttatcgtgatttaccacgactatggatgcagcctgatggggacgctgcactgctgaactatcatattgttggcgtcacccgtgatggtattcctgaaccctggcatcttgactggcatatcgggttaatgagtattgtcgtgggcgataaacaacgtttcttgcctcaaggcgactatcattatcaaattcattatcaggttaaaaatgctttcctgcgtgagggggattctgatctgctaatctggaacgtgaccggtaaccactggccgtttgaaatttataagacccgtttttctctccagttctctaatattgcgggtaatccatttagcgaaatcgatctttttaccggagaagagggcgacacatatcgtaatggccgcatccttgaggacggaagaattgaatcccgcgatccgttttatcgtgaagatttcacggtcctctaccgctggcctcacgctttacttagcaatgccagcgctccgcaaacgacgaatattttcagccatcttcttttaccctccacgagtagcttgttaatttggtttccgtgtctgttcctggtttgtggatggttatatctctggaagcgcaggccgcaatttacgccggtagatgtgattgaaaccgatgtcattccgccagattacacgcccggcatgttacgtctcgatgcgaagctagtttacgacgataaaggtttttgtgccgatatcgtaaatctgattgtgaaaggaaaaattcatctggaagatcagtctgacaagaaccagcaaatcctgattcgtgttaatgaaggcgcgaccagaaataatgcggtattactgcccgcagagcagttattactggaagcgttatttcgtaaaggcgataaggtcgttcttacggggagacgcaacagagtcttacgcagggcatttttacggatgcagaaattttatctgccgcgtaaaaagtctagcttttaccggtctgatacttttttgcaatggggtggactggcaatattggcggtcattctttacggtaacttgagtcctgtaggctgggcaggaatgagtctggtgggcgatatgtttattatgatctgctggattattccttttttattttgttcccttgagcttttgtttgcccgcgatgatgacaagccttgcgttaatcgtgtaatcatcactttgtttttaccactgatttgtagtggcgtggccttctattctctctacatcaatgtcggagatgtattcttttactggtatatgccagcgggttattttaccgctgtttgcctgaccggttatctcactggcatggggtatatttttctgccaaagtttacccaaactggacagcaacgttatgcccacggtgaagctatcgttaactatcttgcgcgtaaagaggcagcaacacacagtggacgtcggcggaaaggggaaacacggaaactggattacgcgttgctaggttgggctataagcgcaaatttggggagggaatgggcgttacgcattgcccctagcctttctagcgcgattcgcgctccagagattgcccgtaacggcgttttattcagtttacagacgcacctaagttgcggggccaataccagtttgttggggcgaagttattccggtggtggtgctggcggcggcgcgggtggcggaggcggtggtggctggtaattaagctgatgttaatcgaaacaagctttaaccataaagatagtgtagtatgttgcgcctcaaagccaggccgataaacgtcgagtcgtttacttaaggcctgaagagttcaaacagactttactatcagtgagtcagatgtaagttctgactcactgttgcacaaaagcatatcagacgcctgggaaggcgacaccaaaaggaagctctatgagcgaaaagctacagaaagtgctggcgcgtgccggccacggttctcgccgtgaaatcgaatctattattgaagccggtcgtgtgagtgttgatggcaaaattgctaaactcggcgatcgtgttgaagttacccctggattgaaaatccgtatcgatggtcacctgattagcgtacgtgagtccgctgaacaaatttgtcgcgttctggcctattacaaaccggaaggtgagttgtgtacccgtaacgatccggaaggacgtccaacggtgtttgaccgtctgccaaaactgcgtggcgcacgctggattgccgtgggtcgcttggacgttaatacctgtggtctgctgctgttcaccaccgatggtgaactggcaaaccgtttaatgcacccaagccgtgaagttgaacgtgaatatgccgtgcgtgtatttggtcaggttgacgacgcgaaactgcgtgatttgagtcgtggcgtgcagttggaagatggtccggcagcttttaaaaccatcaagttcagcggcggcgaagggatcaaccagtggtacaacgtgactctgaccgaaggccgtaaccgtgaagttcgtcgtctgtgggaagcggttggtgtgcaggtgagccgcctgatccgtgttcgttacggtgatatcccactgccaaaaggtctgccacgcggtggctggacggagctggacctcgcccagactaactatctgcgcgaactggtggagctaccgccagaaaccagctctaaagtcgctgtagaaaaagaccgtcgtcgcatgaaggcgaatcagattcgtcgtgcggtgaaacgtcacagtcaggtgagcggcggtcgtcgttctggcggacgtaataataacggttaatcaaagtatgccggacgtcatatccggcatttttacagattaataatcgatccctatctgcgcttttacaccggcatcaaacgcatgtttgacggggcgtaattcacttaccgtatctgccagttcaagaatatcccgatgacaaccacgacccgtgataatcaccgtctgttgatgtggacgttcatttaacgcctgcaccacttcttccagtggcaaatagtcatacgccaccatatacgtcagttcatcaagcaaaaccatatccagactggaatcagcaagcatccgctttgcatgttgccagacttcgcggcaggcggcggtatcagactcgcggttttgtgtatcccaggtaaagcccgttgccatcacctgaaactcaacgccatgtggctccagcagattgcgttcgccattaggccaggtgcctttaataaactgcacgacgcctactttttttccgtgaccaactgcgcgtgttgccgtaccaaatgccgcggtggttttgccttttccattgccggtaaagacgatgataataccgcgttcatcctgggcctgggccacacgagcatctactttttctttcactcgctgctgacgctgttggtagcgttcatcactcattgggaaattcctggtttacggcccggttgggcgtcaaaggtcatgccggttttacggcggctgtcatcgcccatcagccagaggtagagcggcatgatatcagcgggtgttttaagtttctgtggatcttcggtcgggaaggcgctggcacgcattgcggtgcgcgtaccgcctgggttaatgcagttgacacgcaggcgctgctgatattcatcggccagtacctgcatcatcccttcggtggcaaatttgctcgctgcatatgcaccccagttggctcgtccctgacgtccaacgctactactagtaaagaccagactaccggcgtcgcttttgagtaataaaggaagcagtgcctgggtgagcataaaggtggcattaacgttgacctgcatgacgtcctgccagacctgcggattttgttcgctcattgggcaaacatcgccgagcaatccggcattatgcaaaacaccatccagacgcggataattaacggcaatgcgctgtgccagttgttggcaattttcggacgtgcaggtcagcaaatcgagaataaaccactgtggctgacgcccagtttcttcgtttatgtggctggctacctgacgtaatttttcttcattacggcccaacagaatcactgtcgcaccatagcgtgcatacgtcatcgcggcttcacgaccaataccatcgctggctcccgtcaccaggataatgcgatcattgagtaaatcttgttttggctggtaatgcatggctactcctcaacgacgttgtctgtcgcgctgccagtgtactttatgactttggggctttatgcctgaaacagaagggcatttcaatcagcctggggcgataacaccgcaaaatggatactttgtcatactttcgctgcaataacatctctgcgagacggcttaacatgcctgttgtaaactgtgagccaaagcgttgtttaaccaaggtggggactcgtggaattgttgtctgaatatggtttgtttttggcgaaaatcgttaccgttgtgctagcgattgcggcgattgccgccattattgtcaatgttgctcaacgtaataaacgccagcgtggcgagttacgggtcaacaatctcagcgaacagtataaggagatgaaagaagaactggccgcggcgctgatggacagtcatcagcaaaaacagtggcacaaagcgcagaagaaaaagcataagcaagaagcgaaagcagcaaaagcgaaagccaaactgggcgaggtggcaactgacagtaaaccccgcgtctgggtgctggattttaaaggcagcatggacgcccatgaagtgaacagcctacgtgaagagataacggctgtactcgcagcattcaaaccgcaggatcaggttgtgctccgtctggaaagccctggtggcatggtgcatggttacgggctggcggctagccaactgcagcgtctgcgcgataaaaacattcctttaactgttacggtagacaaagtcgctgccagcggcggttacatgatggcctgtgtggcggacaaaattgtttccgcaccgtttgctattgtgggttccattggcgtggtggcgcaaatgcccaactttaaccgcttcctgaaaagcaaagatattgatatcgaactgcacactgccgggcagtataagcgcacgctgacgttgctgggtgaaaataccgaagaagggcgggagaaattccgcgaagagttgaacgaaacgcatcagttgtttaaagattttgtgaagcgtatgcgtccttctctggatattgaacaggtggcaacgggtgaacactggtacggacaacaggcggtagagaaaggcctggttgatgaaatcaacaccagtgatgaagttattcttagcctgatggaaggccgtgaagtggtcaatgtacgctatatgcagcgtaaacgactcattgaccgattcaccggcagcgcggcagagagcgccgatcgattgttgctacgctggtggcagcggggtcaaaagccattgatgtaaaagacaaacgcgaggctaagacctcgcgttttgctttaatcaaccagatgatatttttcactaagcacatgggccaggtgtttgaacatattaaacaccgcggtgcttttggctgttggcaatccttgttcatctaaaaagtagtcgccggtaaataccagcacgccattacgctgcgtgacgccggtggcttcaatccctgcgagcgtatcctcatgctcacgaatgattttgttggcctctttcaacagcgtttcgcggtcgatgggttgtgtctctttgttcattatttactccttaaacaaggacattagtctacgccaggcatggcttgcagacaaatataccacgctggtggcaagagcgccttactggcaactttggattttgcatgctaataaagttgcgtatcggattttatcaggtacagtgtgacgctttcgtcaatctggcaatagatttgcttgacattcgaccaaaattccgtcgtgctatagcgcctgtaggccaagacctgttaactcagtcacctgaattttcgtgaacagagtcacgacaaggggttgatatccgcagagagcgagtccatatcggtaactcgttgccagtggaaggtttatcaacgtgcgacgcattcctggaagaatcaaattaggtaaggtgaatatgggtaaagctcttgtcatcgttgagtccccggcaaaagccaaaacgatcaacaagtatctgggtagtgactacgtggtgaaatccagcgtcggtcacatccgcgatttgccgaccagtggcagtgctgccaaaaagagtgccgactctacctccaccaagacggctaaaaagcctaaaaaggatgaacgtggcgctctcgtcaaccgtatgggggttgacccgtggcacaattgggaggcgcactatgaagtgttgcctggtaaagagaaggtcgtctctgaactgaaacaactggctgaaaaagccgaccacatctatctcgcaaccgaccttgaccgcgaaggggaagccattgcatggcacctgcgggaagtgattgggggtgatgatgcgcgctatagccgagtggtgtttaacgaaattactaaaaacgcgatccgccaggcatttaacaaaccgggtgagctgaatattgatcgtgttaatgcccagcaggcgcgtcgctttatggaccgcgtggtggggtatatggttagcccgctgctatggaaaaagatcgctcgtggcctgtctgccggtcgtgtgcagagcgtggcggttcgcctggtggtcgagcgtgagcgtgaaattaaagcgttcgtgccggaagagttctgggaagtcgatgccagcacgaccacgccatctggtgaagcgttggcgttacaggtgactcatcagaacgacaaaccgttccgtccggtcaacaaagaacaaactcaggctgcggtaagtctgctggaaaaagcgcgctacagcgtgctggaacgtgaagacaaaccgacaaccagtaaacctggcgctccttttattacctctacgctgcaacaagctgccagcacccgtcttggatttggcgtgaaaaaaaccatgatgatggcgcagcgtttgtatgaagcaggctatatcacttacatgcgtaccgactccactaacctgagtcaggacgcggtaaatatggttcgcggttatatcagcgataattttggtaagaaatatctgccggaaagtccgaatcagtacgccagcaaagaaaacagtcaggaagcgcacgaagcgattcgtccttctgacgtcaatgtgatggcggaaagcctgaaggatatggaagcagatgcgcagaaactgtaccagttaatctggcgtcagttcgttgcctgccagatgaccccagcgaaatatgactccacgacgctgaccgttggtgcgggcgatttccgcctgaaagcacgcggtcgtattttgcgttttgatggctggacaaaagtgatgcctgcgttgcgtaaaggcgatgaagatcgcatcttaccagcagttaataaaggcgatgctctgacgctcgttgaacttacaccagcccagcactttaccaagccgccagcccgtttcagtgaagcaagcctggttaaagagctggaaaaacgcggtatcggtcgtccgtctacctatgcgagcatcattagcaccattcaggatcgtggctacgtgcgagtagaaaatcgtcgtttctatgcggaaaaaatgggcgaaatcgtcaccgatcgccttgaagaaaatttccgcgagttaatgaactacgactttaccgcgcagatggaaaacagcctcgaccaggtggcaaatcacgaagcagagtggaaagctgtactggatcacttcttcagcgatttcacccagcagttagataaagctgaaaaagatccggaagagggtggtatgcgcccgaaccagatggttctgaccagcattgactgcccgacttgtggtcgcaaaatggggattcgcacagcgagcaccggggtattccttggctgttctggctatgcgctgccgccgaaagagcgttgcaaaaccaccattaacctggtgccggaaaacgaagtgctgaacgtgctggaaggcgaagatgctgaaaccaacgcgctgcgcgcaaaacgtcgttgcccgaaatgcggcacggcgatggacagctatctcatcgatccgaaacgtaagttgcatgtctgtggtaataacccaacctgcgacggttacgagatcgaagagggcgaattccgcattaaaggttatgacggcccgatcgttgagtgtgaaaaatgtggctctgaaatgcacctgaaaatggggcgtttcggtaaatacatggcctgcaccaacgaagagtgtaaaaacacacgtaagattttacgtaacggcgaagtggcaccaccgaaagaagatccggtgccattacctgagctgccgtgcgaaaaaagtgatgcttatttcgtgctgcgtgacggtgctgccggtgtgttcctggctgccaacactttcccgaaaagccgtgaaacgcgtgcgccactggtggaagagctttatcgcttccgcgaccgtctgccggaaaaactgcgttatctggccgatgcgccacagcaggatccggaaggtaataagaccatggttcgctttagccgtaaaaccaaacagcaatatgtctctagcgaaaaagacggaaaggcgactggctggagtgcattttatgttgatggcaaatgggttgaaggaaaaaaataacctttaattctgtcaggtttttataaacaaagggtcgcgaaagcggcccttttttattgcatattattttttcttcacacctatacactaaggctataaatgatatagtggttatagttagcaccttttttattattaaatcgtattagtcacccgccaggtgtgacgaaaaaacgatgttctgatggcgtctaagtggatggtttaacatgaaattacaacaacttcgctatattgttgaggtggtcaatcataacctgaatgtcagtagtacagcggaaggactttacacaagtcaacccgggatcagtaaacaagtcagaatgctggaagacgagctaggcattcaaattttttcccgaagcggcaagcacctgacgcaggtaacgccagcagggcaagaaataattcgtatcgctcgcgaagtcctgagcaaagtcgatgccataaaaagcgttgccggagagcacacctggccggataaaggtagtctgtatatcgccaccacgcatacccaggcacgctacgcattaccaaacgtcatcaaaggctttattgagcgttatcctcgcgtttctttgcatatgcaccagggcagcccgacacaaattgctgatgccgtctctaaaggcaatgctgatttcgctatcgccacagaagcgctgcatctgtatgaagatttagtgatgttaccgtgctaccactggaatcgggctattgtagtcactccggatcacccgctggcaggcaaaaaagccattaccattgaagaactggcgcaatatccgttggtgacatataccttcggctttaccggacgtagtgaactggatactgcctttaatcgcgcagggttaacgccgcgtatcgttttcacggcaacggatgctgacgtcattaaaacttacgtccggttagggctgggggtaggggtcattgccagcatggcggtggatccggtcgccgatcccgaccttgtgcgtgttgatgctcacgatatcttcagccacagtacaaccaaaattggttttcgccgtagtactttcttgcgcagttatatgtatgatttcattcagcgttttgcaccgcatttaacgcgtgatgtcgttgatgcggctgtcgcattgcgctctaatgaagaaattgaggtcatgtttaaagatataaaactgccggaaaaataatttcttgcgttattttcggcaccttttatgtagcgaaggtgccggaatatattctcttttgttacttatttctataccgtgcacaatatttttatccctcatatttatagggtaaattacctgtaaagtagtgtctaattacccgcctcgcaaactccagttttcaaatatctatttcaggtcaaaagattgaattattcactggagacgattcgtaaattcgctggatttttgactaaagtttctttaggatttgtctcatcgtatgattaattacaccaatcgttcaacgtcttgctgataagtgatggcgattatatgaggttagcaatgccttctggaaatcaggaaccccgccgcgatcctgaattaaaacgtaaagcctggctggcggtttttcttggttctgcacttttctgggtggttgtcgcactgctgatttggaaagtgtggggataactatggtcggtcaggagcaactggagtcgtcaccattatgccagcatagtgacaatgaaacagaaacgaaacgggaatgttccgtcgttattccagacgactggcaactaacatcgcagcagcaagcctttatagaactgtttgctgaagatgatcagccgaaacaataattatcatcattcttattacccatttttaatgaattaaagggcttttaatacaccgcagcaataacagcttgagttatctcaacacaaaataataaccgttaagggtgtagcctatgatcaacacaaatatgaaatattggtcctggatgggcgcgttttctctgtcgatgctcttctgggccgaactcctctggatcattactcactgatccttgaccccgctgcggcggggttgtcatttgctttgccacaaggtttctcctcttttatcaatttgggttgttatcaaatcgttacgcgatgtttgtgttatctttaatattcaccctgaagagaatcagggcttcgcaaccctgtcattaaggaggagctatgagcagtaccctacgagaagccagtaaggacacgttgcaggccaaagataaaacttaccactactacagcctgccgcttgctgctaaaagtctgggcgatatcacccgtctacccaagagtctcaaagttttgctcgaaaacctgctgcgctggcaggatggtaacagcgttaccgaagaggatatccacgcgctggcaggatggctgaaaaatgcccatgctgaccgtgaaattgcctaccgcccggcaagggtgctgatgcaggactttaccggcgtacctgccgttgttgatctggcggcaatgcgcgaagcggttaaacgcctcggcggcgatactgcaaaggttaacccgctcagtccggtcgacctggtcattgaccacagcgtgaccgtcgatcgttttggtgatgatgaggcatttgaagaaaacgtacgcctggaaatggagcgcaaccacgaacgttatgtgttcctgaaatggggaaagcaagcgttcagtcggtttagcgtcgtgccgccaggcacaggcatttgccatcaggttaacctcgaatatctcggcaaagcagtgtggagtgaattgcaggacggtgaatggattgcttatccggatacactcgttggtactgacagccacaccaccatgatcaacggccttggcgtgctggggtggggcgttggtgggatcgaagcagaagccgcaatgttaggccagccggtttccatgcttatcccggatgtagtgggcttcaaacttaccggaaaattacgtgaaggtattaccgccacagacctggttctcactgttacccaaatgctgcgcaaacatggcgtggtggggaaattcgtcgaattttatggtgatggtctggatagtctaccgttggcggatcgcgccaccattgccaatatgagcccagaatatggtgccacctgtggcttcttcccaatcgatgctgtaaccctcgattacatgcgtttaagcgggcgcagcgaagatcaggtcgagttggtcgaaaaatatgccaaagcgcagggcatgtggcgtaacccgggcgatgaaccaatttttaccagtacgttagaactggatatgaatgacgttgaagcgagcctggcagggcctaaacgcccacaggatcgcgttgcactgcccgatgtaccaaaagcatttgccgccagtaacgaactggaagtgaatgccacgcataaagatcgccagccggtcgattatgttatgaacggacatcagtatcagttacctgatggcgctgtggtcattgctgcgataaccagctgcaccaacacctctaacccaagtgtgctgatggccgcaggcttgctggcgaaaaaagccgtaactctgggcctcaagcggcaaccatgggtcaaagcgagcctggcaccgggtagcaaagtcgtttctgattatctggcaaaagcgaaactgacaccgtatctcgacgaactggggtttaaccttgtgggatacggttgtaccacctgtattggtaactctgggccgctgcccgatcctatcgaaacggcaatcaaaaaaagcgatttaaccgtcggtgcggtgctgtccggcaaccgtaactttgaaggccgtatccatccgctggttaaaactaactggctggccagcccgccgctggtggttgcctatgcgctggcgggaaatatgaatatcaacctggcttctgagcctatcggccatgatcgcaaaggcgatccggtttatctgaaagatatctggccaagcgcacaagaaattgcccgtgcggtagaacaagtctccacagaaatgttccgcaaagagtacgcagaagtttttgaaggcacagcagagtggaagggaattaacgtcacacgatccgatacctacggttggcaggaggacagtacctatattcgcttaagccctttctttgatgaaatgcaggcaacaccagcaccagtggaagatattcacggtgcgcggatcctcgcaatgctgggggatagtgtcaccactgaccatatctctccggcgggcagtattaagcccgacagcccagcgggtcgatatctacaaggtcggggtgttgagcgaaaagactttaactcctacggtagccggcgtggtaaccatgaagtgatgatgcgcggcaccttcgccaatattcgcatccgtaatgaaatggtgcctggcgttgaaggggggatgacgcggcatttacctgacagcgacgtagtctctatttatgatgctgcgatgcgctataagcaggagcaaacgccgctggcggtgattgccgggaaagagtatggaagtggctccagtcgtgactgggcggcaaaaggtccgcgtctgcttggtattcgtgtggtgattgccgaaagctttgaacgaattcaccgtagcaatttaattggcatgggcatcctgccgctggaatttccgcaaggcgtaacgcgtaaaacgttagggctaaccggggaagagaagattgatattggcgatctgcaaaacctacaacccggcgcgacggttccggtgacgcttacgcgcgcggatggtagccaggaagtcgtaccctgccgttgtcgtatcgacaccgcgacggagttgacctactaccagaacgacggcattttgcattatgtcattcgtaatatgttgaagtaacaactatttgcttgccggttattttgcttccggcaagcaaatgaattacacaatgcaagagggttatttgttcagcaaatggcccattttctcggctttggtatcgagataatgttcgttattggggttacgacctacaatcaatggtacgcgttcaacaatattaatccctgcttcggtcagaatttcgacttttttcgggttattggttaacaagcggacttcattgacgccaaggagtttgaacatatcagcgcaaagagtgaagtcgcgctcatcagcggcgaagcctaactggtggttagcctctacggtatcgtaaccttgatcctgcagtgcgtaagcgcggattttattcagcagaccaatgttacgaccttcctgacggtgatacagcaaaataccacggccttcctcggcaatttgcgtcaatgccgcttcgagctggaagccacaatcgcagcgcaagctgaacagggcgtcaccggtcagacattcggaatggacgcgcgcaagtaccggggtatgcccggaaatatcgccatagactagcgcgacatgatcgtgtccggttgccagttcttcaaatcccaccatcaggaaatcgccccatggggttggcagtttggcttctgccacacgtttaagctgcatgaaattctccagataatgctggttctgtattggcttattttgccataacgagaaggggttcacctaatcacgacgcgtcgatcgttcacggaatggcacaaatctgtcaatttttcctggaactggcgttttcagttatgattgtgggacttatcaaaaaggagaggccatgcgtagcattgccagacgtaccgcagtgggagctgcactattgcttgtcatgccagtagccgtatggatttctggctggcgttggcaacctggagaacaaagttggctactaaaagcggctttttgggttactgaaactgtcacccagccctggggcgtcattacacatttgattttattcggctggtttctctggtgtctgcgttttcgcattaaggctgcctttgtattatttgccattctggcggccgcaatccttgtgggacaaggcgttaaatcctggatcaaagacaaagtccaggaaccacgaccttttgttatctggctggaaaaaacacatcatattccggttgatgagttctacactttaaagcgagcagaacgcggaaatctagtgaaagaacagttggctgaagagaaaaatatcccacaatatttgcgtagtcactggcagaaagagacggggtttgcctttccttccggtcacacgatgtttgctgccagttgggcactgctggccgttggtttgctgtggccgcgtcggcgaacgttaaccattgctatcttgctggtctgggcaacgggagtcatgggaagccgcctgctgctcgggatgcattggccacgcgatctggtagtagctacgttgattagctgggcgctggtggcggtggcaacgtggcttgcgcaacgaatttgtgggccattaacaccacctgcggaagaaaatcgcgaaatagcgcaacgagaacaagaaagttaacgctggttgattttccgaatttagcccttaaatcatcaacaatgcgtgtggatgccatttcgcagacggcgcgaaaatggtactttaaagggctattgcggtaagttgaccataatttattcgctctaaccacataacgggaagtaatgtgaaatatttactcattttcttactggtgttagcgatcttcgtgattagcgtcacgttgggtgcgcagaacgatcaacaggtgacgtttaattatctgttagcgcaaggggagtaccgtatttccacattgctggcggtattgtttgctgcggggtttgctatcggttggttgatttgtggcctgttctggctgcgagttcgtgtttccctggcgcgcgctgaacgtaaaataaagcgactggaaaaccagcttagtcccgcgactgacgtggctgtagtgccgcacagcagtgcggcgaaggaataactttctatgctggagttgttgtttctgcttttgcctgtagccgctgcctatggctggtatatgggccgcagaagtgcgcaacaaaacaagcaagatgaagccaaccgcttgagccgtgattacgtagcgggggttaacttcctgcttagtaatcaacaggataaagcggtagacctgtttctcgatatgcttaaagaggatacaggcaccgttgaagcccaccttacgctcggaaacctgttccgtagccgtggcgaagttgatcgcgctattcgcatccatcagaccctaatggaaagcgccagcctgacctatgaacagcgtctgttggcgattcaacaactggggcgtgattacatggccgccgggttatatgaccgcgcggaagacatgttcaatcagctgaccgatgaaactgacttccgcattggcgcgctgcaacagttgctacaaatctaccaggctaccagtgagtggcagaaagcaattgatgttgccgaacgcctggtgaagctgggtaaagataaacagcgcgtcgaaattgcccatttctactgtgagttagccctgcagcatatggccagcgacgatctcgatcgtgccatgaccttgctaaaaaaaggggcggcggcagataaaaacagcgcccgcgtatccataatgatgggacgcgtgtttatggcgaaaggagaatacgccaaagccgtcgaaagtctgcaacgcgtgatatcccaggacagagaactggtcagcgaaacgctggaaatgttgcaaacctgctatcagcagttgggtaaaactgccgaatgggcagaattcctgcagcgtgcggtggaagagaacaccggtgccgatgctgaattgatgcttgctgatatcatcgaagcgcgcgacggtagtgaggccgcacaggtctatattacgcgccagcttcagcgtcatccgaccatgcgtgtgttccataagttaatggattaccacttaaatgaagcggaagaagggcgtgccaaagagagcctgatggtgctgcgtgacatggttggcgagaaggtacgtagtaagcctcgttatcgttgccagaaatgtggttttaccgcatacaccctctactggcattgtccgtcttgtcgggcctggagtaccattaaaccgattcgcggtcttgatggcctgtaatttttaaaaaaaatccgactttagttacaacatactaattattaatgttccattgtgctccggcaacgacggcgcagaaaaagcctgccaggggagaaatcgcaactgttaattttttatttccacgggtagaatgctcgccgtttacctgtttcgcgccacttccggtgcccatcatcaagaaggtctggtcatgacgttaactgctagttcttcttcccgcgctgttacgaattctcctgtggttgttgcccttgattatcataatcgtgatgacgcgctggcctttgtcgacaagatcgacccacgcgattgtcgtctgaaggtcggcaaagagatgtttacattgtttgggccacagtttgtgcgcgaacttcaacagcgtggttttgatatctttcttgacctgaaattccacgatatccccaacactgcagcgcacgctgtcgctgctgcagctgacttaggcgtgtggatggtgaatgttcatgcctctggtggggcgcgtatgatgaccgcagcgcgtgaggcactggttccgtttggcaaagatgcaccgcttttgattgctgtgacagtgttgaccagcatggaagccagcgacctggtcgatcttggcatgacactgagtcctgcagattatgcagaacgtctggcggcactgacgcaaaaatgtggccttgatggtgtggtgtgttctgctcaggaagctgtgcgctttaaacaggtattcggtcaggagttcaaactggttacgccgggcattcgtccgcaggggagtgaagctggtgaccagcgccgcattatgacgccagaacaggcgttgagcgctggtgttgattatatggtgattggtcgcccggtaacgcaaagcgtagatccagcgcagacgctgaaagcgatcaacgcctctttacagcggagtgcatgatgagtgattccaacagccgtctggtctacagtacggaaaccggacgtattgatgagtccaaagcggcccctgtacgccctaaaggcgacggtgtggtgcgtattcagcgtcagaccagtggacgtaaaggtaagggcgtttgcctgattaccggtgtcgatctcgatgatgccgaactgacaaaacttgcagcggaactgaagaaaaaatgcggctgcggcggagcagttaaagatggagttattgaaatccagggcgataagcgtgatttattaaaaagtctacttgaagcgaaagggatgaaggtaaaactcgcaggcggttaacataaaaagccacggatatatccgtggctttcgaatattttactgtgcgtattattcagttatttcgtactgaacagaatcaagcgtattataattgcgagtcgataatcgacatttatttacgattatttaccgacctggtgaccaataacacctccgacagctgcaccacctaatgtacccaacgtactgccatcggtcagtactgcaccgcctaatgcccctgcacccgcgccgattgcggtgttgcggtcccgtttagaccagttagaacaggcactcagagacattgccaaagtaattgccagaacagccgcggtcatttttttgctcgttacaaacataatactctctcctgaatttatgattcacggaagtaagctctctataactataatagctaagaataagtctggtgaaattattccgtgaaatctgctcgcgcgcagggttatatcacgcaggtgataatgacttcctgttatatcgctgataataattttatatcttgagagtgttaataacaggtaaatagtcttaattatcaaccaggaatcatcttagagcggatgatttgccaaactgcaaatcatccgtagagaagggaaatggttaaatgtcaacgacgtgaatggtgagtttactgtgctcaagatgcatcagatcgctggcgcgtattttgctatcggtaatcacgcgattgaatcgctcaacgggaccgatggagtaactatgtacagcaccaaatttgctgctgtcagtcaggactatcgcttcgcactctttttccagcacggcattgaccacatcggtacgcatcatatcgcgaccggtaaatccagtttcaggttgccagccatcaataccaataaatgctttgctgaaatgcacctgttggatgcactggcgtgtcaaagggccaaccatactttcgctttttttctgatacacgccaccgagcaaaataacttcacaaggcgcgtctttcagcaaatgcgcgatgtagctgctgaccgtgatgatagtgacatttttcttctgctcgcccagagtccgggcgagtagggcattgctgctgccattttcgataaagatggtttcgcccggttgaaccaggctcgcggcaaactcggcgagttcacgcttcagcgtatagttgctcatcatacgggtttcgacgtcatcactatcaaggctaacagcaaagccatgtgcacggcggaggtaactcagtttttcgagtgtgttgagatcctggcgaatggtaacttcagaaactccagtggcttttgccagatcggttacgctaacctgaccctggtcaatgaccatctgtagaatagtttgttgtcgggaattcatcgctgtaattcttataacgttataatacttaataaaaaaatactgacgcgccgggcatcctcaaataggaaaacctgaaggcacgattgttaaatctcccacggtgccttcgggatgtctggcgtagattcagcaacctggcgcaagagttctgctttaagtatctcgagattatggatcgcagagtggtaatcgcctgccacaaggatatctaacacaatatcaatacgttcggcaacgcgctgggcatcaaattcagacatcaaggacatccttatagcaaaagggggaaaatgaataatgcaaaaattgccgctaaaagagaagtgtttaacagcaacggctaattatcatccaggaatacgatatataatgacgggatatagcgctaagtatatatattcatctacttatgcgcgcttcagatagcgtttataccagcgttcgaaggcgacggcgggcatcggtttggcaaacaaaaatccttgccgctcattgatcccgttcttggttaaaaaagcatcttcctttgcactctctacaccttcggcgatcacctgaagattcaatgcctgggccacagcgacgatcgcccggaccagactctggctgacaggttgtttgtgaatatctcgaacaaaaacctggtcaagtttgatggcatcgatcggaaagcgcgccagttggctaagactagagtagccggtaccaaaatcatccagatgcacttgcgcacctagttggctaaattgttgaataacagacagtgccagttcatcattctcaatcagacaactctctgtcagttcaacatctatagggcagtattcaaaattgagttcctggagaacctgtttcagggcggtgaaaatggtttgatcggcgagctgacgtgcagaaatatttaccgccactcgcaggtttatgcctttatcccgccactttgccacctggcgtacgacatcgagaatcacccaacggcctaaaggcacaattagcccactctcttcggcgtaggaaatgaagtccaacggtggaatcaacccacgttcaggactctgccaacgtactagtgcttccagactgcgcacttcgccacgccaggtgattttcggttgatagtgaataaccaactgatcgttttccagtgctttacgcaagttggtatccagccagagatattcaaatacccgttgattcatttctggggtaaaaacgcaaaattgtcctcgtccgccttccttcgctgtgtacattgctgtgtcggcgtgacgaataatagccgtgctgtcactaccatgttcgggagagagtgcaatacctacactacagctggtataaacttcaattaaaccaatgcgaaaggggagccgtaagcgggtcaaaattcgacttgccattgcttccagcgcgctttgactggtgttggatgccagtaccagaaactcatccccacctggacgagccaacacctggtcatgttcgagacagcttaaaatagccaaactcacgtcgcgtaataactggtcaccaaacaaatgcccataggcgtcgttgacctttttgaaattatccaaatcaagatacacaaccccaactttattgttatctgcatgattaatagcgtgatcgattaaatcctgcattgcgttacgattcggcagtccggtgatactgtcggtatttgccagaatacgcagtcgctcctgagcgcggcgctcttcggtaatgtcggtgccggaacagattaaaaaaatctcgtttttgccactgccgctgtggacaaatttattgcgaaacagaaacagccgctggcctttacatgttggtatccacagttcgacttcatatgcattgccgcttcgaaaaaatacacggttattgcgcctggatgccgcagcttcacgacggctcataaacagtttaaacacgctttgcccaatgacgtcgtgttctttcaaccctgtgtaatcttcacataaccgattgaagcgttggatattcccccggctgtcgagaatcactattgcggaatgtgcttcagaaactacctgctcagcaaaggaaagcccgtgacttaaatcacgagcaaccgccggtgtgtcatgccatgcagacgcgttgccagcccattcccgtttattgatttttcgtcctaccagatgcacagaaagatcgctttcatcgacggtcagactcatcatcaggctggaggtgatgaccgtcatttccctgatgcgagcagcctgttcggcagataactgcaatgtacgatcaggttctgtggtttcggtggtagaaaagcgcaaaacatcgctgctttccgtcaaccgccagtatggattgtggcttccgagaaagttgtacaacgttgtggactccctaacggttttcatgatgcatatcctccggttaacagcggagtccgcggttaaataaaaggaacaacatgacttacatgaaattaacggcggctaaacgcattgttttttttatatatttatttgtaatccagttttggaaaaacgccagttttcaaacgaaagtcagttaaaaaatctgcctggatataacgaaggtagagcggggaaataaacggcccatccatgaggaatgggccgtgaaaggagattacgcgaccgggcgcgcaataatgctgcgggtttccatgcggacttcggcaatagtgacgtcaataacgtcagtcactttgtaaaccgtttcacctttaatttgtacagtgccgttttcctggctgcaaaccagttcatcgcgcacagcgtgtaagaaaggtgccggaataaaggcgatagcgccgttatcaaccaaacgaacacgcatgccgccacggctgatatcgacaatttccgctgcgaaacgggtgtcggtcccggctttgtctttcaggaagcgtgcgtataaccagtcaccaacatcacgttctgccatccggttgagacggcgacgctcggccatttggacagtgatttcatcctgtgggcgcgtcgcagtttcgcctttgataaccgctttcagcagacggtggttgatcatgtcgccatatttacggatcgggctagtccaggtggcgtatgcttccagaccgaggccaaagtgaggaccgggttcagtgctaatttcagcaaaactctggaagcgacgaatgcggctgtcgaggaaaccagttggttgcgcgtccagttcacgacgcagtttgcagaaaccgtccagcgtgagcacttcttcggcatcgacatgcagaccgtgcgttttcagcaacgctgccagcgcgtcggcattcgccggatcaaagcccatatgcacgttatagatgccaaaaccgagcttatcgcgcagtacgcgggccgcacaaatgttagcggcaatcatcgcttcttcgacgatacggttggcaatgcgacgaggctcggcgacgatatccagcacttcacctttttcaccgagaataaagcggtaatccgggcgatctttaaacaccagtgcgtggttatgacgccactcgccgcggcgttggcaaatttgcgctagcaaacggacttgttcggcaattgcttcactttcaggctgccagtcaccggtattttccagccagtcagaaacctggtcatacaccagctttgctttggattcgatggtggcggcaaagaattcgatattatcttcaatggtgccatcagcggagagcgtcatgcggcatgccagtaccgggcggacttcattggcgcgcagactgcagagatcgtcagaaagctcgcgaggcagcatagggatgttgaagccaggcagatagttggtgaatgcgcgaattttcgcggctttgtccagcttgctgccttcagcaatccacgcggttggatcggcaatcgccacaatcagctgaagtttgtcatccggcaacgccttagcgaaaagggcgtcatccatatcttctgtgctggcactgtcgatggtgacaaaatccagcgcggtcagatcttcacgaaccagaccttcatcgagcatttcggtagcgacgccgtctggtgcttctttttccagattatggcgtgcaagggtaacccaccacggtacaaagtgatcgtcaccaaaagtgatgtattgtgtcagttctgcatagaaagaacgatcgcctttcagcggatgacggcgcatttcggcaaccgcccagtcgccttctttaaactcgtggttcaggccacgggctgcgcggcaaggaatggcgtcttttaagagtggatgatcaggaacgatggccagacggtcatttttgccctgaaccttacccacgaaacgagtcaggaacggttcaaccagttcttctggctctgcggattcacgttctttttcactgtggatcaccgcgataattcggtcgccatgcatgacttttttcatctgcggcggcggaatgaaataacttttttgcgcgtcgacttccaggaagccaaagcctttttctgtggcttttaccaccccttcagcgcgtggcgtctgggaatgcagttgctgtttaagctgcgctagcagcgggttgtcctgaaacataattgtctattttggtggccattagagcggctgacagttttacgcgaatctgtctgacgcggcaaggttaatatgtctcacccaacgcgatttttaagcgatttatccagccacacagcccgctccataccagcagattaataatctgcgtactacttttttcgtgttcgagtaaagggctgaactgggcggcgctaaagcgatcgggtgctcgggtcagccattgtatcgcctgaacggtagcgcgctcaacagaatgacggtcagcccattggttaatttcattttcgcccttgcgcataagggtgctgatttttttatattcattactactatccatacaggtggcaaaacaagcaggactgccatttatacgcgcgcataacaacgccgcaagctgattatccggctgtgtattgccccgtgtgctgtttaacaacttttcgagaagggaaagactaatagggtggagagagagtatttcggccagttggcaaagttctgcagtactactttttgtgtgctcttcaggtagtttttccacctcatagctgcttcgccagcgtaaactttcatcagcaaacagactcgcgtcggcgtagttttgtatctccagcccgggtaaccagcgtaccggatgcccgagataagcctgaaatgtcgcaattgtccgcgcctgaaagccaataaaaccaatgatttggctaatgatcacacagtcccaggcagtaagaccgacgtcattcagatgctggcggcttcggttgtcgataatagaagggctgctagccagttggcgggcatattgcgtgatttgtgccaaccgatgattactttccctggtggaatcaggcccggggagcggcgtaagtcgcgcgctatagtagttacataaccgctggacgccgcaaacctgagcaaccgtcagggccgtgctcaagcgttcataagcggtgaaggtctgactacgggtcacggtaagctggtcagggaacaaatccactgcaagaacacgcgcagggtccagccaactaaggaagggggccagcgtttctttttcaaggatcacgtcgagtagaaagggatcgctgacctttgcggcttccgggaccagaggcagaacgtcatactccgtagtactggattgcgtttcatgataccagtggcttttgccggtgatgtggcgttgttccatgggcgctccttggtcgtaaaggaaatcgttatcctgacgcaaggcgggaaggggagaaagacggatcggcgataacaaatatcagaaaggtataacagagataacgggcggcagaacgccgcccatctttaccaacagaacgattatttcagttcgagttcgttcattgcagcaatgctgaaaccgccgtcaacgtggaccacttcaccggagataccggcagagagatcggagcacaggaatgccgcagagttacccacatcttcaatagtaacggtacggcgaatcggggtaacggcttcgcaatgagccagcattttgcggaagtctttgataccggaggccgccagagtacggatcggaccagcagagatggcgttaacacgcacaccttccggacccatcgcgttcgccatatagcgcacgttcgcttccagagacgcttttgccagacccataacgttgtagttcgggatagcgcgctcagcgccaaggtaggaaagggtcagcagggcagaacccggattcagcatggagcggcaagcttttgccattgcaacgaagctgtaggagctgatgtcgtgggcaattttgaagccttcacgggtaacggcgttaacatagtcaccatccagctgatcgccaggtgcaaaaccaatagagtgtacgaaaccgtcaaatttcggccaaactttccccagttcagcgaacatggtgtcgatgctggcatcttctgcaacatcgcactgcagaacgatgtcagaacccaattgagcggcaaattcttctacgcggcctttcagtttgtcgttctggtaggtgaatgccagttcagctccttcgcggtgcatcgcctgagcgataccgtaggcgatggatagtttgctggcaacaccggttaccagaatgcgcttaccggaaagaaaacccatagctttaatccttattgttgatgcttgttgtgcctgaaaatcaggcgattcgtcgttttagtaaacagtacgaacagataaacggttattataatcaacctggctgtgagtagctatagttgccaggtccgaccggagcaggctgcggcagggggggcgcttttcccctcaccctaaccctctccccagaggggcgaggggaccgtattgtgcaaatattgttaccccagcaacaaacaggctcatacagcccctaaccctttcatggcgatggctgggacggttcagaccttgccgaatattctccagcaccgtctccatgttttcaccacaacagctattcggctcggtctgccccctcgctctttcagggagagggactccggcggttcagttcctgcagaatattctccagcaccgtctcctcattacaatcaatctcgttattccagaaacgcagcacggtccagccctggctctcaagccagctagtgcgcctggaatcataggcaactgctaaatcatgctgcccaccatccagctcaacgactacacgcgcgctgcagcaagcaaaatcgagaatgtagctccccactggatgttgacggcgaaatttgaaatcactaaaacgtcggctgcgaagatatcgccagagctttcgttcctgcaaagtgagattgcgtcttaaatcacgcgcattacttttaattttatctatcacctcattctgacaagatttaatcttttgtcagaatgaggtgaataatctggaaggaggattcagaaaattagcgatctttacgccacgcatccgccgtcaatgcctcgccaaaatgaccggcaatcagccgtttggtgagttcatgcagcgggcttgccagcacatccgcggtgctgcctcgctcgacaacctcgccctgatgcatcaccagcacctggtcgctaatgtgcttcatcattccgatatgctgggtaacataaatatagctaatgccctgtttttcctgtaattccagcatcagattaatcaactggctacgcatgctcatatccagactagcgagggcttcatcggcaataatgacttttgggcgcaatatcagcgcgcgcgccagacccagacgctgtttttgtccgggtgccaacatatgcggatagtaactgacgtgatccggtagcagcccaaccatacgcatcgtttcaataatctgtttgcgacgctgttccggttccaggtcggtgttcaggcgcagtggaaaatccagaatttggctgatacgttgacggggattcaagctggtgctaggatcctgaaaaatcatgcgaatacgctgactgcggaaggaataatcgccaaaatgcagtggatgatcgtcaatcaataactcgccgctggtaggctctatcattcccgccagcatttttgccagcgtggatttaccgctaccattctcgccaataatcgccagtgtctggccttcacgtagcgtaaagctcaagggttttaccgcttctacggtctgacgacgaaaccagccggtccggtagcggaacgttttacttaaattacgcacttcaagcagcgtttcgatcatctcactctttctccatgttcagcgggaaatgacaggcatagagatgatttttcgcccccgtcaaacgtggcgtcacaatgcattctcgttgtgcatacgggcaacgtggccccagacgacaaccaatcggtaactgttccagcagtgggatagcgccgggcagcgtattgaggcgacttttatgcggcatcgcgctgccgaagtctggtatcgcgcggatcagcgcctgggtataaggatgatgtggcatcgtcaccaactccttactcggcgcggtttccactgtttgaccgcagtaaagcacgttaattttatccgcccattggctaagcatttgtaagtcatggctgataagcaaaatagtggtattgctgttttggttgagacgcgtcagcaggcgaaagatttgcgcctgggttgttggctccatactgttggtcggttcgtcagcaatcagcagacgcggttgattcgccagtgcaatggctatcatcactttctgacattcaccttcggtcaactcatagggaaaactgcgcatcgcatctttgtgatctttaatccccacgcggtgcagcagttcaatggcacggcgtttgcgccagccaaaacgctgccaccaacggcctttataggtccaggctgggatgttttgcatcaactggcggcccacacgttcactagggtcaagacagctctgcggttcctggaaaatcatgctcacgttatggccaaccagtttgcgccgttcgcgtgcggagagacgcagcaaatcgatatcatcaaaacgcatacggtcagcagtaacacgccagttatctttattcaccccacaaatcgctttcgcaatcaaactcttgccggaaccggattcaccaacaagaccgcggatttcaccttcggttaaggtcatacttacccggtcgacggctttaacccactcatcaccggttttaaattcaatggtcaggttacgaatatcgagtaatggcattattccacccccgcaataatcgcacgacgaacgccatcgccaaggaggttaaccaacaacacgctaatcataattgccgcacctggcagcatgacagtccacggggcgacataaatcagttccagcgcatcaccgagcatcgctccccattcagggctggggagttgtgcgccgagatcgagaaagcccagcgcggcgatatcgagaattgccatgctcagtgcgcgggtgatctcggtgaccagcccggcggtgatgtttggcatcacagcaaaccagagaatattcagcgtacttgcgccatccagacgggcggcgataacgtactctttttccagttcgtcatgcaccatgctgtaaatgctacgtaccatacgcggcagcaatgccagccagacagcaaacatagcgtgggacaaactcggtccggcaaacgctacaacgataattgccaacagcaggctagggatcgccagtaaggtatccagaatatggttaagcaccgcactgcggaggccgtgtgtcgccccggcgaaggtgcccagtaccaggccacagatcgtcgcggcaagcgtcaccacaaatgcgccacccacggttggcgcagctccgctcagtaaacggcttaaaacatcgcgtccgaggtcgtcagtccccaggaagaaagaaacttcgccatagcggctccaactcggcggcaataattgataaccgagaaattgctggtcgatgccgtaaggcgcaaaccagccgccaaaaatacacagtacagccagccccgcgcagccgtacaggccgaccatcgcagaggcgtcactataaaatttgcgccaggcggtacgcagcgtgcccggcgggcgcttttcgctgtatacgctatcgtaaggcataccattccttatgtttcagattatttatcgtaaggcataccattccttatgtttcagagggttagccatggcacccaaaatatcagaaatcacgttaacaataatgaccagactgccacacaccatcactccggcggaaatggctgcgtaatcctgctggcggatggcgttaattaaccagcgccctaaacccggccagctaaaaaccatttcggtgatcatcgccagcgtcagcatggtggaaaactgtaagcccaggcgaggaataaccggcggtaacgcgttatgcagaacgtggcgacgcaaaatagtaaagcggctcaaaccgcgggtcgccgccgcttttacatagttctggtcatacacttcgatagtgctgatacgcatcaggcggatcacttcagttgttggcgcaacgctcagggtgatcacgggcaatatcatatggcggattgcgctcatgatcatttcatcccgccatggactgtcgctaagccaggcatcaatcaacgcaaaaccggtaatcggtttcacttcgtagagcagatcgaaacgcccactaacgggcaaccaacctagcgtgagactacaaaacagcgtcaacagaagcgccagccagaacaccgggatactaaagcccagtaaggcgatggcgttgatcaagttatcctgccacttatggcgcgtaatcccggcaatcatccccacggggatgccaacaatcagcgcaaaaccgaaggcgaggatgcacagttccatcgtcgccgggaagacctcttttaactgttcggcaatcggttgaccgttaatgctggaaacaccaaaatcccagtggatcaggccgttaaaccagaacacccaggcattccacagactcgcgccttgtaacggcgcatgaggggtgaaatagctcaagctgaagccaacgaaggtcagcaggaacaaggtgacaatcaataacaaaatgcggcgtaaggtgaagataatcatggttttttcacctcatcctgtttctcgcgatacaccccagcaaaggaggcgttaccaaacgggctaagtaccagacctttgatatcgtaccgataggcctgcaaacgcaaactgctcgccagcggcaaaatgggcaattcctgcgccagaatactctgcgcttcgtcataggcttcaatacgcgccgccagctgctggctagagagcgccttacgcaatacgctgtcgaatttcggatcgcaccagtgggcgaggttggtctggctatgaattgccgcgcagctcagtaacggacggaagaaactgtccgggtcgttactgtccgtcgcccaaccggataacgtcagatcatggctcatatccatcaaccgcgcctcctgaaagcgaccttctaccggcacaatcaccacttttacgccaacctgcgccatatccgcctgaatcagttcggcagttttcagtggactggggttccacgcctggctacgtgtgggcacccacagtttcagcgttaaattttccagccccaagctcttcaactgttcgcggcttttcgccggattgtattcagtaattttagcctcgttgtcataggcccagctggcgcgcggtaaaatagaggccgccgtttcagccgtaccataatagatggattgcatcaggcgctggttattaatcgccagtgccagcgcatggcggacagcgggattatttagcggcggtttggcggtgttaaatgccagataggcgacgttcatcccaggacgcagcgttaaacgcaagcgcgggtcgtcacgcaaaatggatagctggctggcagcaggccaggccagaacgtcgcattccccggtcaggagtttgctcagacgtccggtgccgccggagcctaaatccaccactacctgcggcattaacggtttaccgcgccagaagtcatcatgacgttgtaggcgaataaattgcccggcgcggtattcgctcaactgatacggaccggtgccgaccggttgacggtcgagttgctcctggcgatcttctttctctaacttccgggcatattctgcgctcatgacgctagcataatgggttgcgaggtgccacaaaaaagaagcatccggctgggcgagtcggaactcaacggtatgattatccagtttgcggacgcttttcacgttatcggcaaattgcaggctgtcgaagtaggggaagttgctgccgttgacgttatgccacgggttgttgcggtcaaaaattcgctggaaggtaaacaccacatcgtcggcattcattttacgagtgggagtaaaccagtcggttttttgaaacggaacatcgcgacgcaggtggaagcgataggtcgcgccgttgtcgagtacttcccagctttcggcaagttccggcatcaggcgataggtatagggatcgacatccagcagtcgatcataaaactgggcggcaagggtatcgacaattaacccactgctcgctttggatgggttaaaggtgttgacttgcccgctgacgcaatagacaaaaccgctgtcgcggatatcagcatgcgggggagattcaggcgcggcgattgcctgaccactcacaagtccagcaatcaccaaaagagagcttaatacctggcgcataatattaagggattttatgtaaagaggctatcttactaatatttaatgacatttgccattaccgtttgtgttcaggggtcgtaatgagggccgtgtggttggtcgttgaacaggtgacgtcgccatctgttcaacattcgtacccgtgatttctctataactataactcacagaacaacttagcgaggagcagagcggtacgatcgtgagaaacccattaaagcacgctgcagtgcgtgtcattgttagccagatgcggcgtgaacgctttatccggacaacgatactgaccgatcgtctgcaattaaatcattactcattaccccattgattcaaaaactctgcgatctcatcaatgcgtacgggattaatccccgcttcagcagccatttcatgttgggcttcttcgctgatctcttcattgttcatcaaacgggtgagcagtaactggaagtagtgggccagcggtgtgcgttcagcctctgcgacaggctctgcgcattcggtcgcgtactcatcggcaatatcaaaatattttagcgggatatcgtggttcattatttgcccctggggttaatgcgctaagcataagggcggatgatagcactcgtgatccgggtcatacatctttttatagttaatggcgcggcgcgttaccctcaggcaggataatgcgccgcgcatccgactattacgtttcactcaccggcgttctgtcaccatcatacaacggcactttgcgatagcggcggatcagataccataaatatgcgccgcctaagctagcccataccagaccgagtgtcagactcgtactctcgaggttaacccacagcacacccaccgtcagcgcgccaaccagcggcatcagcaaatagtggaagtgatccttccagcttttattcattcctttacgccgccagaaatgattaaacacgctcagattcacgaaggtaaacgccaccagagcaccgaagttaattaacgctgtggcggtaactaaatcgaagaacagcgcgctcaacgcgacaatcccgaccataatgacgttgagtgccggagtccgccattttgggtgcacatagccaaacacgcgctccggaaacacattgtcacgccccatcacatacagcagacggctcacgctggcatgactagccaggccagaggctaacgtgttcacaaacgtggtgcagaggaaaatgctctggaagagcttgccgccgacgtacagcgcaatttcaggcagtgcggcatccggatctttaaagcggctgatatcgggaaagaacagctgcataaagaagctcgccgcgataaagataacgccaccgtagaccgccgtcaggaagatggctttcgggatcacgcgtgcggcgtccggcgtctcttcgctaagcgtggtcaccgcatcgaaaccgaggaaggagaaacagacaatcgtcgccccggtaataatcgggatcaggtgcgcgttctcgctgataaacggctgaagactccagacggtgccaacgccttctcctttatgcagtccctgaactaccaggaagataaacaccaccatgatggagatttgcaccagtacaaacagggtattgaagttagcgaccaggttgacgctcttcagattcgcggcggttaaaatggcgacgaaggttaccacccacacccacggcggcacttccgggaagagggcggagagatagattttcgccaacaagacgttaatcatcggcaaaaagagataatccagcaggctactccagccgaccataaatccgacgtgcgggttaatgctcttttgcgcgtaggtataggcgctaccggcctccggaaactggcgaaccagtttgccgtagctgatagcggtaaacagcacacccgccagcgccagcaaataggacgccggaacgtgaccgtcgctaatgccggagacaataccaaaagtatcaaatacggtcatcggcgtgagataggccagacccatcatcaccacctgccacaatttcagactttttcgcagacgggttttgccgggttgcgcagcaatattcagtggactattaatagccataattgctgcctcccctgcgtaataaggtttgcggtcgtgtcgacctgaaatcaaacctgtttagcaagggaagcaaagggggcggagtccagtcagtagcaggaggggcgcatacgcagcctccctcgccatgcggggatttaatcatcggcatcatctcatttcctcgtcacagtcttaatcgttaacggaagcccgttgccgcccgcgctccataacgcgacatccgggaaatgtctggattaccagcaaatgtcaggcctggctccgctcaggccgatgaaacaaccccgcaaggggtattacgcgtttttcaacatccactcaatttctgtttctgtgatgaggcgctcaaactgcaacagctcatcatttttacaggcgtgatagacatggcagaagcgttcgcctaaatagcggcgcaggtgatcattctcgataaactcacccagggcatcgctctggcgaatcggaaagggtaagccttcctgttccagcccgttgccttcgacttcttcctgcaacggcagctcgttatcaaggccatgcaaaataccggcaaaaatcgctgccatcaccagatatgggttggcatcggcacccgccacgcgatattccacgcggtgattatgacggtcgccgcacggaatacgcagggcgacggtgcggttgttatggccccagctcgcctgcgtcggcacatacattcccggctggaagcggcgatagctgttcacgtttggtgccagcaacgccatgctgctcggcatcaggtcaatcatcccggcgagcatctttttcagcagcgggctatcttcgccttccgcgtcagaaagcacgttctcgccacgattattttgcatactgatatggatatgcattccgctgcccgcgtgctcttcatacggcttcgccataaaagtggcgtgcatcttatgcttttctgccatcagacgcaccaggcgttttagtgccagcgcatcatcgcaggcttccagcacgttatcagtatggtaaaggttgatttcaaactgacccgggctggcctcagcgaccgcgccatctgccggaatcagctgtaactgcgccagttcatcaatatcattgagcacgtcggcgaagtggttgaggttatcaacggagtaaacctggctttgtgtattgcggtcatcggtgccaggcgcgcagggcggttgcagatacccttcagcgtcgcgctggcgatccagtaaatagaactccagctctaccgctacgaccgggaacaatccgcgctggcgcagctgctgccacaggcggttaagaacgttccgcggctcaacgtcaaagggagcgccatcttcatcgaccatggtcaggagcatctgaccgataaactctggatcggcggcagaaggagttaaggaaccgagaacaggaacacaggtacgatccggctcgcccatttcctgacccagacctgcttcttctactacgttgcccagaatatccattgcaaatacgctggccgggaaataacaccctttctcgagcttcttcaggctactaacaggaatacgctttccacggaagcaaccatttaaatcggtaagtaaaacatcaacatattgcgtattcgggtagcgctccaggtagcgtttcacttcctgcgtaaaggcgctaccccgcctctcttcactctgctgaacaaagttctctacttcaacgatattggtttccatgattcttcgcctttggtttgttttccgctcgttatcaaagcgtaaaatataatgaccaccattcgaatctgtatgcaaactaaatgtttgtcaaatgttaaattgagtttgcaaaaatgaaaacccactgctagattgaaaaaatattgaacataaaggtcatttaaagcgcagtaatggcgataatttagtccactttgtgagattgagcatggaaaatataatgaacaatccggttatcggtgtcgtaatgtgcaggaacaggcttaagggtcatgcgacccagactctgcaagaaaagtacctgaatgccatcatccatgcaggcggcttgcctattgcgctaccacatgcgctggcggaaccgagtttacttgaacaacttttgccgaaactcgatggcatttatcttcctggtagtcccagcaatgtgcagccgcacctatatggtgaaaacggcgatgagcctgacgccgatcccgggcgtgatcttctgagcatggcgataattaatgccgcactcgaaaggcgcatccccattttcgccatctgccggggtttacaagaactggtggtggcaaccggtggtagcttgcatcgcaagctgtgcgaacagcctgaattgctggaacatcgggaagatcccgaactgccggtggaacagcaatatgcaccgagccatgaagttcaggttgaagaggggggattactgtctgcgttgttacctgaatgtagcaacttttgggtaaactctctacatggacaaggggcgaaggtcgttagcccacggttgcgtgttgaagctcgcagcccggatggcttagttgaggcggttagcgtcatcaatcatccttttgcgctgggcgtacagtggcacccggaatggaacagtagcgagtacgcgcttagccgtatattgttcgagggctttatcaccgcttgtcagcaccatatcgctgaaaaacagcgactctgaccactacagtttaaggaaatgcaaatatgagtgatgagggactggcgccaggaaaacgcttgagcgaaatccgccagcagcaggggcttagtcaacgtcgtgccgccgaactctccgggctgactcacagtgctatcagtacgatagaacaagataaagtcagccctgccatcagtacgctgcaaaagctgctgaaggtgtatggtctgagtctcagcgaattcttttccgagccggaaaaacctgatgagccgcaggtcgtcattaatcaggacgacttaattgagatgggtagtcagggtgtgagtatgaagctggttcataacggtaacccgaatcgcacgctggcgatgatctttgaaacgtaccagccgggcacaaccactggggaaagaattaagcatcagggtgaggaaataggcactgtactggaaggtgaaattgttctgacgattaatggtcaggattaccacctcgtcgcggggcaaagttatgccattaataccggcatcccgcacagtttcagtaatacgagcgcaggtatttgccgaattatcagcgcccatacgcccaccacgttttaatctttttgttctgtaagccgggtaagcgcaatgcgcccggcaatctatacacaaaatcattcaagttgcatcaaggcggcaagtgagcgaatcccgatgagcttactcaggtaagtgattcgggggagcgaacgcagccaaggcagaggcggcttgaaggatgaagtgtatataaagaatgtcgccagaaataaacgggcatacggcccggggatctctgcgccctgacgttcacaaactgcatatatctgatagacgtgaaacaggagtcataatgaattttcatcatctggcttactggcaggataaagcgttaagtctcgccattgaaaaccgcttatttattaacggtgaatatactgctgcggcggaaaatgaaacctttgaaaccgttgatccggtcacccaggcaccgctggcgaaaattgcccgcggcaagagcgtcgatatcgaccgtgcgatgagcgcagcacgcggcgtatttgaacgcggcgactggagtctctcttctccggctaaacgtaaagcggtactgaataaactcgccgatttaatggaagcccacgccgaagagctggcactgctggaaactctcgacaccggcaaaccgattcgtcacagtctgcgtgatgatattcccggcgcggcgcgcgccattcgctggtacgccgaagcgatcgacaaagtgtatggcgaagtggcgaccaccagtagccatgagctggcgatgatcgtgcgtgaaccggtcggcgtgattgccgccatcgtgccgtggaacttcccgctgttgctgacttgctggaaactcggcccggcgctggcggcgggaaacagcgtgattctaaaaccgtctgaaaaaagtccgctcagtgcgattcgtctcgcggggctggcgaaagaagcaggcttgccggatggtgtgttgaacgtggtgacgggttttggtcatgaagccgggcaggcgctgagccgtcataacgatatcgacgccattgcctttaccggtagtacccgtaccgggaaacagctgctgaaagatgcgggcgacagcaacatgaaacgcgtctggctggaagcgggcggcaaaagcgccaacatcgttttcgctgactgcccggatttgcaacaggcggcaagcgccaccgcagcaggcattttctacaaccagggacaggtgtgcatcgccggaacgcgcctgttgctggaagagagcatcgccgatgaattcttagccctgttaaaacagcaggcgcaaaactggcagccgggccatccacttgatcccgcaaccaccatgggcaccttaatcgactgcgcccacgccgacagcgtccatagctttattcgggaaggcgaaagcaaagggcaactgttgttggatggccgtaacgccgggctggctgccgccatcggcccgaccatctttgtggatgtggacccgaatgcgtccttaagtcgcgaagagattttcggtccggtgctggtggtcacgcgtttcacaagtgaagaacaggcgctacagcttgccaacgacagccagtacggccttggcgcggcggtatggacgcgcgacctctcccgcgcgcaccgcatgagccgacgcctgaaagccggttccgtcttcgtcaataactacaacgacggcgatatgaccgtgccgtttggcggctataagcagagcggcaacggtcgcgacaaatccctgcatgcccttgaaaaattcactgaactgaaaaccatctggataagcctggaggcctgaaatgaccgaacataccagcagttactacgccgccagtgcgaataaatatgcaccattcgacacgctgaatgagagtatcacctgcgacgtttgcgtggttggcggcggctataccgggctctcctccgcgctgcatctggcggaagcgggctttgacgtagtggttctcgaagccagtcgcatcggctttggcgcaagcgggcgcaatggcggacagcttgtgaactcctacagccgcgacatcgacgtgatcgaaaaaagctacggcatggacaccgcccgtatgctcggcagcatgatgttcgaaggtggtgagatcatccgcgaacgtatcaaacgttatcagattgactgcgactaccgccccggcggcctgtttgtggcgatgaatgataaacagctcgccacacttgaagagcagaaagagaactgggaacgctacggcaataaacagctggaattgctggacgccaacgccattcgccgtgaagtagccagcgatcgctataccggtgcgctgctggatcacagcggtgggcatattcatccgctaaaccttgccattggcgaagcggacgccatccgcctcaacggcgggcgcgtgtatgaactttctgccgtgacgcagatccagcacaccacgccagccgttgtgcgaactgccaaaggtcaggtgacggcgaagtatgtgattgtcgccgggaatgcgtatctgggcgataaagtagagccggaactggcgaaacgcagcatgccgtgcggcacgcaggtgatcaccaccgaacggctgagcgaagatttagcccgtagcctgatcccgaaaaactactgtgtggaagactgtaactatctgcttgattactaccgtcttaccgccgacaaccgcctgctgtacggcggcggcgtggtctacggcgcgcgcgacccggatgacgttgagcgccttgtggtgccgaaactgctgaaaaccttcccgcagctgaagggcgtgaaaattgattaccgctggacgggcaacttcctgctgaccctgagccgtatgccgcagtttggtcgcctcgataccaacatctattacatgcagggctacagcggccacggcgtgacctgtactcatctagccggacgtttgattgccgaactgctgcgcggcgacgccgaacgtttcgatgccttcgccaatctgccgcattacccgttccccggcgggcgcacgctgcgtgtgccgtttaccgcgatgggcgcggcgtattacagcctgcgcgatcgtctgggcgtttaatttccgattaaccgtgaagagtcaaaaggtgtgaaacatgagcaacaatgaattccatcagcgtcgtctttctgccactccgcgcggggttggcgtgatgtgtaacttcttcgcccagagcgctgaaaacgccacgctgaaggatgttgagggcaacgagtacatcgatttcgccgcaggcattgcggtgctgaataccggacatcgccaccctgatctggtcgcggcggtggagcagcaactgcaacagtttacccacaccgcgtatcagattgtgccgtatgaaagctacgtcaccctggcggagaaaatcaacgcccttgccccggtgagcgggcaggccaaaaccgcgttcttcaccaccggtgcggaagcggtggaaaacgcggtgaaaattgctcgcgcccataccggacgccctggcgtgattgcgtttagcggcggctttcacggtcgtacgtatatgaccatggcgctgaccggaaaagttgcgccgtacaaaatcggcttcggcccgttccctggtagcgtgtatcacgtaccttatccgagtgatttacacggcattagtacacaggactccctcgacgccatcgaacgcttgtttaaaagtgacatcgaagcgaagcaggtggcggcgattattttcgaaccggtgcagggcgagggcggtttcaacgttgcgccaaaagagctggttgccgctattcgccgcctgtgcgacgagcacggtattgtgatgattgctgatgaagtgcaaagcggctttgcgcgtaccggtaagctgtttgccatggatcattacgccgataagccggatttaatgacgatggcgaaaagcctcgcgggcgggatgccgcttagcggcgtggtcggtaacgcgaatattatggacgcacccgcgccgggcgggcttggcggcacctacgccggtaacccgctggcggtggctgccgcgcacgcggtgctcaacattatcgacaaagaaagtctctgcgaacgcgcgaatcaactgggccagcgtctcaaaaacacgttgattgatgccaaagaaagcgttccggccattgctgcggtacgcggcctggggagcatgattgcggtagagtttaacgatccgcaaacgggcgagccgagtgcggcgattgcacagaaaatccagcaacgcgcgctggcgcaggggctgctcctgctgacctgtggcgcatacggcaacgtgattcgcttcctgtatccgctgaccatcccggatgcgcaattcgatgcggcaatgaaaattttgcaggatgcgctgagcgattaatagcccaacgcaataatgtctgatgcgctgcgcttatcaggcctgcaaacgacgtattgattatgtatgccgaataaagcattcacgccgcatccggcaagttgtattgctcaacttcgttaaatctggtgctttttcaacaacgcgcggaactgatgataagttaaccccagtaattcagccgcgcgcttctggttatatttcccttgttgcaaactgagttgcagcaactctttttcctgctgcatctgaaactcacgtaaatccagcggcagtgttggaaggctggtggtttcactaacggcgatagcgtcttcaggcggacgccgtttaaagggatcaataatgatgtcatcaagcggataatcgctggtgccgtggcgatacacactacgttccaccacgtttttcaattcacgaatatttcccggccaacgataattcagcaatgtttctctggcgcgctccgtaaaccccgggaacagaggcagcttgatttcccgacacatctggatggcaaagtattctgccatcaacattatgtcgctttcgcgctcgcgcagtggtggcagttgtacaacatcaaaagccagtcggtcgagcaggtcagcgcgaaaagtgccttcattgaccatcgccgggagatcggcattcgtcgcgcataccaaccgcacattcacctgcaatggttggctgccgccaacgcgctccagttcaccgtactcaatcacgcgcaataatttctcctgcaccatcatcggtgccgtagcgagttcatcaagaaatagcgtaccgccgtcggcacgttcaaatctccctggatgacgtttttgcgcaccggtaaacgcccccgcttcgtgaccaaacagttcggaatccagcagattttcatttaacgccgcgcagttaagggaaataaacggcccttgccaacgggaggagagataatgcaggcggctggcaatcagctctttaccggtgccgcgttcgccgatgatgagcaccggtttgtccagcggtgcgagatggctaacctgttccagcacttcgagaaagctgttcgcctcaccaagtaaattatctttgtattctgccatgatgaaattcgccacttgttagtgtaattcgctaactcatcctggcatgttgctgttgattcttcaatcagatctttataaatcaaaaagataaaaaattggcacgcaaattgtattaacagttcagcaggacaatcctgaacgcagaaatcaagaggacaacattatgggtattttttctcgctttgccgacatcgtgaatgccaacatcaacgctctgttagagaaagcggaagatccacagaaactggttcgtctgatgatccaggagatggaagatacactggttgaagtacgttctactagcgcgcgcgcgttggcagaaaagaaacagctgactcgccgtattgaacaagcgagcgcgcgtgaggttgaatggcaggaaaaagccgaactggcgctgctgaaagagagagaggatctggcacgtgcagcgttaattgaaaaacagaaactgaccgatctgattaagtccctggaacatgaagtgacgctggtggacgatacgctggcacgcatgaagaaagagattggcgagctggaaaacaaattgagcgaaacacgcgctcgccagcaggcattgatgttacgtcatcaggcggcaaacagcagccgcgatgtgcgtcgtcagctggacagtggcaaactggatgaagcaatggctcgtttcgaatctttcgaacgtcgtattgaccagatggaagcggaagcagaaagccacagcttcggtaaacaaaaaagcctggacgatcagtttgccgaactgaaagccgatgatgcaatcagcgaacaactggcacaattaaaagccaaaatgaagcaagacaatcaataataacatccaggcggcgtccgaacgcgccgccgctcatcgtctaaggagtacttatgagcgcgctatttctggctattccgttaaccatttttgtgctgtttgttttaccgatctggttatggctgcattacagcaatcgttctggtcgcagtgaattgagccaaagtgagcagcagcgattagcgcaactggctgatgaagcaaaacggatgcgcgaacgtattcaggcgctggaatctattcttgatgcagaacatccgaactggagggatcgctaatggcgggcattaatctcaataaaaaattatggcgtattccacagcagggcatggtccgcggcgtctgcgccgggattgccaactattttgatgtaccggtaaaactggtgcgtatcctggtggtgctgagcattttcttcggtctggcgctgtttaccctggttgcttacatcattttgagttttgcgcttgatccaatgccggacaacatggcctttggtgagcagctaccttccagcagcgaattgctggatgaagtcgaccgtgaactggcggcaagtgaaacgcgtttacgcgagatggaacgttatgtcacttccgatactttcacgttacgtagccgtttccgtcaactgtgaggaaagttatgaatactcgctggcaacaggccgggcaaaaggtaaagcctggtttcaaattagcaggcaagctggtacttcttaccgcactgcgctatggcccggcgggtgtggcgggctgggcgataaaaagtgttgctcgccgaccgctgaaaatgttgctggctgtggcgctggaaccgctgttaagtcgggctgctaataaactggcacagcgttataaaaggtgaggggagtttcgcaaaaattgttaaatctcaggcgtataatggatggcaattttcatccatagaaggacgcttacatgtttaaaaaaggcttacttgctctggcactggtgtttagtctgcccgttttcgccgctgaacactggatcgatgttcgtgttccagagcagtatcagcaagagcacgttcagggggccatcaatattcccctgaaggaagtgaaagagcgcattgccaccgccgttccggataaaaacgacaccgtgaaagtgtattgcaatgccggacgccagagtgggcaagcaaaagagatccttagcgagatgggatatacccacgttgagaacgccggtggcctgaaagacatcgcaatgccgaaggtcaaaggttaaaagaattcaccatgagcggcgcttatgcgccgtttttttttctgtcacaccttatttacatccccatagattatttgcgtcagctcacaaatacgctttttccctggtaaaaaatgatttcctgcgtgactaaaacccttgtgctcaattgacagtttattttctgcggagtagtctctcgtttcatgggaccgctaccacggaaaggcaacatgaaacagaaaattacggattacctggacgaaatctacggtggaacatttaccgcaactcatttacagaaacttgtaacgcgtcttgagagtgcgaaacgattaattacacagcgacgtaaaaaacactgggatgaaagtgatgtcgtgttaattacctatgccgatcaatttcacagcaatgatttaaaaccattacccacatttaatcagttttaccatcaatggctgcaaagcatttttagtcatgttcatttgttgccgttttatccatggagttctgatgatggctttagcgtaattgattatcatcaggtcgccagtgaagcgggggagtggcaggatattcagcaactcggtgaatgcagtcatttaatgtttgattttgtctgcaaccatatgagcgcaaaaagtgaatggtttaaaaactatttacaacagcatccaggttttgaagatttttttattgccgttgacccgcaaaccgatctcagcgccgtcactcgcccgcgtgcgttaccgttattaacgccattccagatgcgcgatcatagtacgcgccatttatggaccacctttagtgacgatcaaattgacctgaattaccgtagccctgaagtgttgctggcgatggtggatgttttactctgttaccttgcgaaaggtgctgagtatgtccgcctggatgccgttggctttatgtggaaagagccgggaacaagctgcatccatctggaaaaaacacatctgattatcaaactgttacggagcattattgataacgttgcgccaggtacagtgatcattaccgagaccaatgttccgcataaagacaacattgcttactttggcgcaggcgatgacgaagcacatatggtgtaccagttcagcctgccgccactggtgctgcatgcggtgcaaaaacagaacgttgaggcgctttgtgcgtgggcgcaaaacctgacactaccttccagcaacaccacctggtttaacttcctcgcctctcacgatggcatcgggctaaacccgctacggggcttgttgcctgaaagcgaaatattagagctggtcgaggcgttacagcaggaaggtgcattagtaaactggaaaaataatcccgacggtacacgcagtccgtatgaaataaatgtgacctatatggatgcgttaagccgccgtgagagtagcgatgaagaacgttgcgccaggtttatccttgcccatgcgattttgttaagtttccccggtgtgccagcgatatatattcaaagtattcttggcagccgtaatgattacgcaggtgtcgaaaaactcggatataaccgtgcgattaaccgtaaaaaatatcacagtaaagagataacccgagaactgaacgatgaagctacattaaggcatgcggtatatcatgagttgagccgtttaattacacttcgtcgcagccataacgagtttcatccggataataattttaccattgatacgattaatagttccgtaatgcgtattccaagaagtaacgctgatggtaattgtctgactggattgtttaatgtcagtaaaaatattcagcatgtaaatattactaatctgcatggtcgggatctgattagtgaagttgatatattgggtaatgaaataacgctgcgcccctggcaggttatgtggattaaataaaaaggaacatctcatgattaaaagtaaaatcgtgctgttaagtgcactggttagttgcgccctgattagtggctgtaaagaagaaaataaaacgaatgtatccatcgaatttatgcattctagcgtggagcaggagcgccaggccgttatcagtaaattgattgcccgttttgaaaaagaaaaccctggcatcaccgttaagcaagtgcccgtggaagaagatgcctataacactaaagtcattactcttagtcgtagcggtagcctgccggaagtgatcgaaaccagccatgactacgccaaagtgatggacaaagagcagcttatcgatcgcaaagcggttgccacagtcatcagcaacgttggtgaaggcgcgttttacgatggcgtactgcgtattgtgcgtaccgaagatggtagcgcatggaccggtgttcctgtcagcgcctggattggcggtatctggtatcgcaaagatgtgctggcaaaagcggggcttgaggagccgaaaaactggcaacagctgctggacgttgcacagaaactgaatgacccggcgaataaaaaatacggcattgcgctgcctacagcagaaagcgtgttgacggaacaatccttctcccagtttgcgttatccaaccaggctaacgtctttaacgccgaaggcaaaatcacccttgatacaccagagatgatgcaggcactgacctattaccgcgaccttactgccaacactatgccgggttctaacgacatcatggaagtgaaagacgcctttatgaacggcaccgcgccgatggcgatttactccacctatatccttccggctgtgattaaagaaggcgacccgaaaaacgtcggtttcgtggtgccaaccgagaaaaactctgcggtctacggcatgttgaccagcctgaccattaccgccgggcaaaagaccgaagagacggaagcagcagaaaaatttgtcacctttatggagcaggcagacaacattgccgactgggtgatgatgagcccaggtgctgcgctgccggtgaataaagcggtggtgactaccgccacctggaaagacaacgacgttattaaggcgctgggtgaactaccgaatcagctaatcggtgaactgccaaatattcaggtttttggcgcagtaggggataaaaactttacccgcatgggtgatgtgacgggttctggcgtggtgagtagtatggtgcataacgtcaccgtgggtaaagccgatctctctactacgctgcaagcgagccagaaaaaactggatgaactgatcgaacagcactaaacccaggacaggaatccgcaatgaacaggctttttagtggtcgttccgatatgccctttgcgctgctgcttctcgcgcccagcttattactgctgggcggtctggtggcgtggccgatggtgagcaatatcgaaatcagttttttacgtctgccgctcaatcccaacatcgagagtacgtttgttggggtgagcaactatgtgcgtatcctctccgatcccggcttctggcatagcctgtggatgacggtctggtataccgcgctggtggtggcgggcagcaccgtgctcgggctggcggtggcgatgtttttcaaccgcgagttccgcctgcgcaaaaccgcgcgtagcctggtgatcctctcctacgtaacgccgtccattagcctggtgttcgcctggaaatacatgttcaacaacggctacggcattgttaactacctcggcgtcgatcttctgcatctctatgagcaggcaccgctgtggttcgataatccgggcagtagctttgtgctggtggtgctgttcgccatctggcgctacttcccgtatgcctttatcagctttctggcgattttgcagaccatcgacaaaagcctgtacgaagcggcagagatggatggcgctaatgcctggcaacggtttcgtatcgtcacgctgcccgcaattatgccggtcctggcgacggtggtgacactgcgcaccatctggatgttctacatgttcgcggatgtttatttgctgacgaccaaggtcgatattctcggtgtatatctctacaaaaccgcctttgcctttaatgatttaggaaaagcggcggcgatcagcgtggtgctcttcatcattattttcgctgtcattctgctgaccaggaaacgggtgaacctcaatggcaacaaataaacgcacactcagtcgcatcggtttttactgcgggctggcgctgtttctcatcatcacgctgtttccattttttgtgatgctgatgaccagcttcaagggcgcgaaagaggcgatcagtctgcatcctacgctgctgccgcagcagtggacgctggagcattacgtcgacatttttaacccgatgattttcccgtttgtcgactacttccgtaacagtctggtggtgtctgtggttagttccgtggtggcggtattcctcggcattcttggggcttacgcgctttcccgcctgcgctttaaaggtcggatgaccatcaacgccagcttttacacggtgtatatgttctctggcattttgctggtggtgccgcttttcaaaatcatcaccgcgcttggcatttacgacactgagatggcgctgatcatcaccatggtgacgcaaactctgcccaccgccgtgtttatgctgaaaagctacttcgacaccatccccgatgagatcgaagaagcggcgatgatggatggcctcaaccgtctgcaaattatcttccgcatcaccgtgccgttggcgatgtccgggctgatatccgtgttcgtctactgctttatggtggcgtggaacgactatctgtttgcgagcattttcctctccagcgccagcaatttcaccttaccggtgggcctgaacgcgctgttcagtacgccagattacatctggggacggatgatggcggccagtctggtgaccgcattgccggtggtgattatgtatgcgcttagcgaacgttttattaagagtggtttgaccgccggtggcgtgaagggctaaagcggccagtttctttacaaggagttttaaatgaaaaagttagtagccacagcaccgcgtgttgctgcgctggttgagtatgaagatcgggcgattttagctaatgaagtgaagatccgcgtgcgtttcggcgcaccgaaacacggaacggaagtggtcgacttccgcgccgccagcccgtttattgatgaagactttaacggcgaatggcagatgttcactccgcgtccggcagatgcgccgcgcggcattgagtttggcaaattccagcttggcaacatggtggttggcgacattatcgagtgcggcagcgacgttaccgactacgcggtgggcgacagcgtatgcggctacggcccgctctccgagacggtcatcattaacgcagtgaataactacaagctgcgcaaaatgccgcaaggcagctcctggaaaaacgccgtctgctacgacccggcgcagtttgccatgagcggcgtgcgcgatgccaacgtgcgcgtaggggattttgtggtggtggtagggcttggcgcaatcggtcaaattgccatccaactggctaaacgcgctggcgcttctgtggtgattggcgtcgatcctatcgcccatcgctgtgatattgcccgtcgccacggcgcggatttctgccttaaccccatcggcactgatgtaggtaaagagatcaaaacgctgaccggcaagcagggtgccgatgtgattatcgaaaccagcggctacgccgacgcgctgcaaagcgcgctccgcggtctggcttatggcggcaccatctcctatgtcgcgtttgccaagccgtttgccgaaggttttaacctcggacgcgaagcgcatttcaataacgccaaaattgtcttctctcgcgcgtgcagcgaaccgaacccggattatccgcgctggagccgcaagcgtattgaagaaacctgttgggaactgctgatgaacggttatctcaattgcgaagatttaatcgacccggtggtgacctttgccaatagcccggaaagctatatgcagtatgtcgaccagcatccggaacagagcatcaaaatgggcgttacgttttaattcaaaggaatgaaaaaaatgaaaatcggcacacagaatcaggcgttctttccggaaaacattctggagaaatttcgttatatcaaagagatgggcttcgatggttttgagattgacggcaaactgctggttaacaacatcgaagaagtcaaagcggcgatcaaagaaaccggtttaccggtgaccaccgcctgcggtggctatgacggatggattggcgactttatcgaagagcgtcgtcttaatggcttaaagcagatcgagcgcattctcgaagcgctggcagaagtgggcggtaaaggcatcgtcgttccggctgcgtggggcatgtttaccttccgcttaccgccgatgaccagcccgcgtagcctggacggcgaccgcaaaatggtgagtgattccctgcgcgtactggaacaggtcgccgcgcgtaccggaaccgtggtgtatctcgaaccgttaaaccgctatcaggatcatatgatcaacaccctcgccgatgcccgccgttacatcgtcgaaaacgatcttaaacatgtacagattatcggcgatttctatcacatgaatatcgaagaagataacctggcgcaggcgctgcatgacaaccgcgacctgctcggtcatgtgcatattgcggataaccatcgctaccagccgggcagcggcaccctggatttccacgcgctgtttgaacagctgcgcgcggataactatcagggctatgtagtgtacgaagggcgtatccgggcggaagatcctgcccaggcgtaccgtgatagcttggcctggttgcgtacctgctaagaggtctttgtgaaaagtgcaatgacaagctctccgctgcgggtcgcgataataggcgcaggccaggtggcggataaggttcatgctagctactactgcacccgcaacgatctggaactggtggctgtctgtgacagccgcctttcccaggcgcaggcgctggcagaaaaatacgggaatgcatccgtgtgggacgatccgcaggccatgctgctggcggtgaaacctgatgtggttagcgtctgcagtcctaaccgttttcattacgaacataccctgatggcactggaagcgggctgccatgtgatgtgcgaaaaaccgcccgccatgacgccagaacaggcgcgggaaatgtgcgataccgcgcgcaaactgggcaaggtgctggcctacgactttcaccatcgttttgcgctcgatacgcaacagctgcgtgaacaggtgaccaacggcgttttgggagagatttacgttaccaccgcccgcgccctgcgtcgctgcggcgttcccggctggggtgtctttaccaataaagaactgcagggtggtggcccgctgatcgacatcggcattcatatgctggatgctgcgatgtatgtgctgggctttccggcggtgaaaagcgtgaatgcgcatagctttcaaaagatcggcacgcaaaagagctgtggtcaatttggtgagtgggatccggcaacttacagcgtcgaagatagcctgtttggcaccattgaatttcataacggcggcattctgtggctggaaacgagttttgcactcaacatccgcgaacagagcattatgaacgtcagcttttgtggtgataaagctggtgcgacgctgtttccagcacatatctacaccgataacaacggtgaattaatgacgctgatgcaacgggaaatagcagacgacaaccgccatttgcgcagcatggaagcctttatcaatcacgtacagggcaagcccgtgatgatagccgacgccgagcaggggtacatcatccagcaactggtggcggcgttgtatcaatccgcagaaacagggacgcgtgtggaattatgaccaggccagtaacgttaagtgaaccccatttcagccagcataccctgaacaagtatgcaagcctgatggcgcaggggaacggctatcttgggcttcgcgccagccatgaagaagattacacgcgccagacgcgagggatgtatctggcggggctgtatcatcgggcgggaaaaggtgaaatcaacgaactggtgaacctgcctgatgtcgtggggatggagattgccataaatggtgaggttttcagcttatcccacgaagcctggcagcgtgagcttgactttgccagtggcgaattacgccgcaatgttgtctggcgtaccagcaacggcagtggttacaccatcgccagccgtcgctttgttagcgcagaccaactgccgctcattgcgctggaaatcactattacgccactggacgccgacgcgagtgtgctgattagtacaggcattgacgccacgcaaaccaatcacggtcgccaacatctcgacgaaacccaggtgcgggtgtttggtcagcatctgatgcaggggagctacaccacccaggatggacgcagtgatgtggccatcagctgttgctgtaaggtgagcggtgatgtgcagcaatgctataccgccaaagagcgccgtttactgcaacataccagtgcgcagcttcatgcaggcgagacaatgacgttgcaaaaactggtgtggatcgactggcgggatgacaggcaagctgctttagacgagtggggcagcgcgagccttcgccagcttgaaatgtgcgcgcagcagagttacgaccaacttcttgcagcaagtacagaaaactggcgtcaatggtggcagaaacgtcgtatcacggtaaatggcggcgaagcgcacgatcagcaagcgttagattatgcgctttatcatctgcgcatcatgacgcctgcccacgacgagcgcagcagcattgcggcaaaaggcttaaccggcgaaggctacaaaggccacgttttctgggatacagaagtatttttgttaccgtttcatctgtttagcgatccgacggttgcccgaagtttactgcgttatcgctggcacaacttgccaggcgcgcaggagaaagcgcgacgcaacggctggcagggcgcgctatttccgtgggaaagcgcgcgcagcggcgaagaagagacgccggaatttgccgccattaacattcgcaccgggctgcggcaaaaagtggccagcgcgcaggcggaacatcatctggtggccgatatcgcctgggcggttattcaatactggcagaccacgggggatgaaagtttcattgcgcatgaaggcatggcgctacttctggagacggcaaagttctggattagccgcgcggtgagagttaacgatcgtctggaaattcatgatgttattgggccagacgaatataccgaacatgtcaataataatgcatacaccagctatatggcccgctacaacgttcaacaggcgctgaatattgcccgccagttcggctgtagcgacgatgcgtttatccatcgcgccgaaatgttcctcaaagagctatggatgccagaaattcagcccgacggcgttttgccgcaggatgatagctttatggctaagccggcgattaatctggcgaaatacaaagcggcggcggggaagcaaaccatactgctggattatagtcgcgcagaagtgaacgagatgcagatcctcaaacaagctgatgtggtgatgctcaattacatgctgccggagcagttcagtgcggcaagctgtcttgccaatctgcaattttatgaaccgcgcactattcacgacagcagtttaagtaaagcaatccacggcattgttgccgcacgctgtggcctgctgacccaaagttatcagttctggcgcgaggggactgaaatcgatcttggtgctgatccgcatagttgtgatgatggtatccatgctgccgcaactggcgctatctggctgggggcgattcagggttttgccggggtgagcgtgcgtgacggtgaattgcatctcaatccggcgttacctgagcagtggcaacagttgtctttccctctgttctggcagggctgcgaattacaggtcactcttgacgcgcagcgtattgcgattcgaacttctgcgcccgttagtctgcgtttgaacggtcagcttataaccgtggctgaagaatctgttttctgtttgggtgattttattttgcccttcaatgggaccgctaccaaacatcaggaggatgaatgaaactgcaaggggtaattttcgatctggatggtgtaatcaccgataccgcgcatctgcatttccaggcgtggcagcagattgccgctgaaattggcatcagcattgatgcgcagtttaacgaatccctaaaagggatcagccgcgatgagtctctgcggcgcattctgcaacacgggggcaaagagggcgactttaacagccaggagagggcgcaactggcgtatcgcaaaaatctgctctatgtccacagtctacgcgagttgacggtcaacgctgttctacccggcattcgctctttgctggcagatctccgtgcacagcagatcagcgttgggctggcttctgtctccctgaatgcgccgacgattttagcggcgctggagctgcgcgagtttttcaccttctgcgcggatgcttcccaacttaaaaacagcaaaccggacccggaaatctttctcgccgcctgtgcagggctgggcgtgccgccgcaggcatgtatcggcattgaagatgcgcaggcgggcattgacgccattaacgccagcggtatgcgcagcgtggggatcggcgcgggcttaaccggggcgcaattactgttgcctagtacggaaagtctcacctggccgcggttaagcgccttctggcaaaacgtataacaaaggaatcaacatggctcagcttagcttacaacatattcaaaaaatctacgataaccaggtgcatgtggtgaaggacttcaacctggaaattgccgataaagagttcatcgtgtttgtcggcccgagcggctgcggtaagagcaccaccctgcgcatgattgccgggcttgaggagatcagcggcggcgatctgttgatcgacggcaaacgaatgaatgacgttccagccaaagcacgcaatatagcgatggtgttccagaactacgcgttgtatccgcatatgacggtttacgacaacatggcgtttggtctgaagatgcaaaaaatcgccaaagaggtgattgatgagcgggtgaactgggcggcgcaaattctcggcctgcgtgagtacctgaaacgtaagccgggggcgctttccggcgggcaacgtcagcgagtggcgcttgggcgggcgattgtacgcgaagcgggcgtgtttttaatggatgaaccgctctctaaccttgatgccaagctgcgcgtgcaaatgcgcgcagagatcagcaagctgcatcagaaactgaacaccaccatgatctacgtgacccacgatcagaccgaagcgatgaccatggcgacgcggattgtgattatgaaagacgggattgttcagcaagtaggtgcgccgaaaaccgtttataaccaacccgcgaatatgtttgtttccggatttattggaagtccagcgatgaattttattcgcggcacgatcgatggcgataaattcgttacggaaacgcttaaattaaccattcccgaagagaaattagcggttctgaaaacacaggaaagtttgcataagcccatcgtgatgggaatacgaccggaagatattcatccggacgcgcaagaggaaaataacatttccgccaaaattagcgtggcagaattaaccggtgcggaatttatgctctacaccacggttgggggcacgagttaaacggttgggggcacgagttagtggtccgtgctggtgcgttaaatgattatcatgcaggagaaaatatcactattcattttgatatgacgaaatgtcatttctttgatgcagaaacggaaatagcaattcgctaaatacagggggaaggcattcccccaggataatacaaggaacaataatgaaaaagttattaccctgtaccgcactggtgatgtgtgcgggaatggcctgcgcacaggccgaggaaaggaacgactggcactttaatatcggcgcgatgtacgaaatagaaaacgtcgagggttatggcgaagatatggatgggctggcggagcctagtgtctattttaatgccgccaacgggccgtggagaattgctctggcctattatcaggaagggccggtagattatagcgcgggtaaacgtggaacgtggtttgatcgcccggagctggaggtgcattatcagttcctcgaaaacgatgatttcagtttcggcctgaccggcggtttccgtaattatggttatcactacgttgatgaaccgggtaaagacacggcgaatatgcagcgctggaaaatcgcgccagactgggatgtgaaactgactgacgatttacgtttcaacggttggttgagcatgtataaatttgccaacgatctgaacactaccggttacgctgatacccgtgtcgaaacggaaacaggtctgcaatataccttcaacgaaacggttgccttgcgagtgaactattatctcgagcgcggcttcaatatggacgacagtcgcaataacggtgagttttccacgcaagaaattcgcgcctatttgccgctgacgctcggcaaccacagcgtgacgccgtatacgcgcattgggctggatcgctggagtaactgggactggcaggatgatattgaacgtgaaggccatgattttaaccgtgtaggtttattttacggttatgatttccagaacggactttccgttagcctggaatacgcgtttgagtggcaggatcacgacgaaggcgacagtgataaattccattatgcaggtgtcggcgtaaattacagcttctgataatgggctaaattgccggatgcggcgcgagtactttatccgatctataaatgtaggccggataagatgcgctagcatcgcatctggcattcaggcaaggtagctggtatttatttcagcgtcatatgcgtggcaacggtaatattctgtggactcggttttccagaaattaagcggaataataactcgcagctttgttgacctaactcctgcgtcggaacatcgatgccgcccggtgcaggcgttaaaataaaactcagcgtttcattgctataacccaccaccgctaactgctgcggaatagcaatatttttctctgctgccgcacgataaatgctcattaatttcaggctgtcagtggcaaacaccgcctcaggcaacggactctggcttaataattgccgtgctgcttttaatgcagtttcatgggtataaccgccatcaacaatccattcatcacgcactgcaatattatgcgcagccaggctctgcttataaccattaacgcgatcaacgctaacatggacatcaagcggagcatgcaggcaggcaatattttgatgcccactttcaattaatgcatcggtcaacgcaatgctgtcgccaaaattatcggtatcgacagaataaacatgggcatattgaccttcaactttgccaatcaccaccaccggaatatcatatttatcgagttgggcaaaaaaactctcatccgctgggctactgagcataataatgcctttaatcattttctgcttaattttgctttcgcatttttgcagatcttctgccggattgtggctcgtttgtaatatcacgtcgaaaccttcttcttcagctttggcggtgatggcatgcaaaacttcagagaaaaacggattacccgccgtagttttggtgctacgggtagaaatcaccataatggcatcaaaaccgctagaggtcagcgcgcgggccagcttgtttggctgatactgtaattcttcaatggcccgtaacactttttcgcgcgcttccggggagatattagtttgcttattcagcacgcgacttacggtggatttacttacgcctgcaaccctggcaatatcataaatagtaggggacataggtcaggaactccgtccgaacgtgaatgctgcacatcttatggagttcgccggtcgatgacaacacgggcagttgataatcaatggcctggcccccacattcatatccttacgaatgattttttttctggtcttcagagcagcacaggacagcaatgaagcgacttaaaaatgaactcaatgcgctggtgaatcggggtgtcgacagacatctgcgcctcgctgtaaccggacttagccgcagcggcaaaacagcgtttatcaccgcgatggttaatcagttgcttaatattcacgccggagcacgtttgccgctgttaagtgcggtgcgtgaagagcgcctgctgggcgtgaaacgcattccccagcgtgactttggcattccgcgcttcacctatgacgaagggctggcgcagttatatggcgatccacccgcctggccaacgccaacgcgcggcgtcagtgaaatccgcctggcgctacgttttaaaagcaatgatagcctgctacgccactttaaggatacctccacgctgtatctggaaattgtggattatcccggcgaatggttgctcgacctgccgatgctggcgcaggactatttaagctggagccgccagatgacgggcttactcaatggtcagcgcggagaatggagcgcgaaatggcgaatgatgagcgaagggctggacccgctagcgcctgccgacgaaaaccggctggcggacattgccgccgcgtggaccgattatctccaccactgtaaagagcaggggctgcactttattcagcctgggcgctttgtcttgccgggagatatggcaggtgcgcccgcgctgcaattcttcccgtggccggatgtcgatacctggggcgagtccaaactggcgcaggccgataagcataccaatgccggaatgctgcgcgagcgctttaattattactgcgagaaggtggtgaaggggttctataagaatcattttctgcgctttgaccgccagattgtgctggtggattgcctgcaacctctcaacagtgggccacaggcatttaatgatatgcgtctggcactgacgcagctgatgcaaagttttcactacgggcagcgtaccctgttccggcgtttgtttagcccggttatcgataagctattgtttgctgccactaaagcggaccatgtgaccatcgatcagcacgctaatatggttagtttactgcaacaactgattcaggatgcctggcaaaatgcggcgttcgaagggatcagcatggactgcctggggctggcgagtgttcaggcgaccaccagcggcattattgatgttaacggtgagaaaatcccggcgctgcgtggtaatcgacttagcgatggcgcaccgctcactgtttatcctggcgaagttcccgcacgtttgcctggtcaggcgttctgggataagcaaggcttccagtttgaggcatttcgtccgcaggtgatggatgtcgacaaaccactaccgcatattcgtcttgatgctgcgctggaatttttaataggagataaattgcgatgaccgaaccgttaaaaccacgtattgatttcgacggtcctctggaggtcgatcagaatcctaaattcagggcgcagcagacctttgacgaaaatcaggcgcaaaattttgccccggccacgctcgacgaagcgcaggaagaagaggggcaagtcgaagcggtaatggacgcagcgttacgtccgaaacgcagcctgtggcgcaaaatggtgatgggagggctggctctgtttggcgcaagcgttgtcgggcagggtgtacagtggacaatgaatgcctggcaaacccaggactgggtggcgctgggtggatgtgccgctggggcattgattatcggcgctggcgtaggttctgtggtaacagagtggcggcgcttatggcgcttgcgacagcgcgcccatgaacgcgacgaagcgcgtgatttattgcatagccacggcacgggcaaaggccgcgcattttgcgaaaaactggcgcagcaggcgggtattgatcagagccatccggcgctgcaacgctggtatgccagtatccatgaaacgcaaaacgaccgtgaagtggtcagcctgtatgcgcatttggtccagccagttttagatgcccaggcgcggcgcgaaatcagccgtagcgcggcggaaagtacgttgatgattgcggtcagcccgctggcgttggtcgatatggcgtttatcgcctggcgcaatctgcgtttaattaatcgcatcgccacgctgtatggcattgaactggggtattacagccgtttgcgtctgtttaagctggtattgctgaatatcgcttttgccggagccagcgaactggtgcgcgaagtggggatggactggatgagccaagatctcgctgctcgtttgtctacccgcgcagctcaggggattggtgcaggacttctgacggcacgactcgggattaaagctatggagctttgccgcccgctgccgtggattgacgatgacaaacctcgcctcggggatttccgtcgtcagcttatcggtcaggtgaaagaaacgctgcaaaaaggcaaaacgcccagcgaaaaataatgcaatatcgggtgctgaccggatatctttacgccgaagtgcccgtttttccgtctttgtgtcaatgattgttgacagaaaccttcctgctatccaaatagtgtcatatcatcatattaattgttcttttttcaggtgaaggttcccatgcgtctggaagtcttttgtgaagaccgactcggtctgacccgcgaattactcgatctactcgtgctaagaggcattgatttacgcggtattgagattgatcccattgggcgaatctacctcaattttgctgaactggagtttgagagtttcagcagtctgatggccgaaatacgccgtattgcgggtgttaccgatgtgcgtactgtcccgtggatgccttccgaacgtgagcatctggcgttgagcgcgttactggaggcgttgcctgaacctgtgctctctgtcgatatgaaaagcaaagtggatatggcgaacccggcgagctgtcagctttttgggcaaaaattggatcgcctgcgcaaccataccgccgcacaattgattaacggctttaattttttacgttggctggaaagcgaaccgcaagatagccataacgagcatgtcgttattaatgggcagaatttcctgatggagattacgcctgtttatcttcaggatgaaaatgatcaacacgtcctgaccggtgcggtggtgatgttgcgaagtacgattcgtatgggccgccagttgcaaaatgtcgccgcccaggacgtcagcgccttcagtcaaattgtcgccgtcagcccgaaaatgaagcatgttgtcgaacaggcgcagaaactggcgatgctaagcgcgccgctgctgattacgggtgacacaggtacaggtaaagatctctttgcctacgcctgccatcaggcaagccccagagcgggcaaaccttacctggcgctgaactgtgcgtctataccggaagatgcggtcgagagtgaactgtttggtcatgctccggaagggaagaaaggattctttgagcaggcgaacggtggtagcgtgctgttggatgaaataggggaaatgagtccacggatgcaggcgaaattactgcgtttccttaatgatggcactttccgtcgggttggcgaagaccatgaggtgcatgtcgatgtgcgggtgatttgcgctacgcagaagaatctggtcgaactggtgcaaaaaggcatgttccgtgaagatctctattatcgtctgaacgtgttgacgctcaatctgccgccgctacgtgactgtccgcaggacatcatgccgttaactgagctgttcgtcgcccgctttgccgacgagcagggcgtgccgcgtccgaaactggccgctgacctgaatactgtacttacgcgttatgcgtggccgggaaatgtgcggcagttaaagaacgctatctatcgcgcactgacacaactggacggttatgagctgcgtccacaggatattttgttgccggattatgacgccgcaacggtagccgtgggcgaagatgcgatggaaggtagcctggacgaaatcaccagccgttttgaacgcagcgtattaacccagctttatcgcaattatcccagcacgcgcaaactggcaaaacgtctcggcgttagtcataccgcgattgccaataagttgcgggaatatggtctgagtcagaagaagaacgaagagtaagcgcgaatatgcctgatggtgcaacaccatcaggcatattaaattatgctttcagtacagccagagctgcttcgtaatccggctcggtggtgatttcatccaccagctggctgaaaatcacattgtcattttcgtcaataaccacaacggcacgcgctgccagacctttcagtgggccatcagcaattgccacaccgtaagcttgcagaaattcagcgttacggaaagtggagagggtgataacgttgttcagaccttctgcgccgcagaaacgagactgggcgaacggcagatcggcagagatacacagcacaacggtgttgtcgatctcagttgccagttggttaaacttacgtacacttgcggcgcaaacaccggtatcaatactcgggaaaatgttcagcactttgcgtttacccgcaaactgaccgagggtgacgtcagacagatcttttgccacgagagtaaaagtctgcgctttgctacccgcctgcgggatggaattggcgactgtaaccgggttgccctggaaatgaacggtttgactcatgattatctttcctgtttacatatagttaacgtcacacctagtttatgctaactgtcaataacacagcaaacgctattacagggtctccttacaacaactgtcaacgcagtttgtaattaaaagattaacccatatctggtgaatgaaacagtgatgaaccttctgccagatcaataaatcagaaaaatttaatgatatgacagaaggatagtgagttatgcggaaaaatcaggcaacgttacgcgtatgaccagcaagctgggccagcgcatcgttattttcgatggtgatgtatttacctttgactgccagcatgccgcttttctggaagcgacccagcagacggctgatggtttctaccgtcaggcccagatagttaccgatatcgccacgagtcatcgtcaggcggaattcacgaggggagaagccgcgttgggcaaaacgacgggacaggttgtagatgaatgcagccagacgttcctcggcatttttcttgctcaacagcaggatcatgtcctgatcgcctttgatttcaccgctcatcagacgcatcatctgctgacgcagattcggcattttaccggacaaatcgtccagcgtttcgaacgggatttcacataccatgctggtttccagcgcctgcgcgaagctcgggtgatggccgctgccgatggcgtcaaatcccaccaggtcgcctgctaaatggaaaccagtgatttgctcgtcgccttgctcagtgatggtataacttttaatcgtaccggagcggatggcataaaggcttttaagttcatcaccagccttaaacagcgtctggcctttctgaataggcttcttccgctcaatgatattatcaagctgatcaagctcatgttcgttgagtgtgaacgggatgcaaagctggctgatgctgcaatcctggcaatggatagcacaaccgccagactgaatgcgccgtataattcgcttttccgggatcataggtctgctcaagccgtaattgatatttgtcaattttaacatctttttagggagcaagtaagtctaagcaaaccttaacagcagagaattccgatattagatgtaaatatatgtctatctatttgaaaacccttaagttgttaagggtaactttacataaaagtgtgaacaagctggcacaaattgtttaatgtttacagcaaaagataaccttcatggcgcaataaccactcttttcgctgaactccgcctgcatatccggtcatggtgccgtttcggccaataacccgatggcaaggtacgacgatgctgatgggattgcttccgtttgccgcaccaacggcacgcgccgcgccaggacggcccaattgctcagccagttggccgtaatgcattacctgcccgcaggggatagtgcgtagtgttttccagacttcgcgctgaaatggcgtcccccccgtagcagtgggaagcgtatcaataatgctaagattaccggcaaaatattcacgaagcttgtcgcttaaaccgcctggattggtggcagaaatgcgctcatagccttctttgcgataatggatgtccagcagctgcaccatgcgttcgctgtactcttcccattcaaccgcccgcaggcgaaattgctcatcgcaaatcacccacagtggacccagtggcgtggcaattttttcttcaagtaatctcagcatccgttctctcttaagacaaacgtgggtaaatacccggacctatcggcagaccgacaagataccacgccagcacatcgcagccatactatgcagaaacaatgctgtcgatggctgcttttgcgtcagactgtgctttcgctgccatttccggaccgtatgcgatcccttcggcgaagacaaatttcacatcggtaatgccgataaagccgaggaacgtggacagatacggcgtcaccaggtccgttggtccatctttgtggatcccgccgcggctggtaataacgatggcttttttacccgttaccagaccttccggaccgttctcggtatagcggaaagtaacgcctgcgcgggcaaccaggtcaaaatagtttttcaactgagtcgagatgttgaagttatacatcggtgccgcaataacgataacgtcgtgggctttcagctcggcaatcaactcatcggaaagtgccagagcttcctgctgacgcggagtcagcggcgcatcgctcggacgcagagcgccaaccagttcgccatccagtaccggaatcggatttgcagccaggtcgcgaacggtgatttcatcagcggagtgcttttcgcgccattgttcaacaaaataatcggacaactgattagactgagagtaccctgccaggatgctggatttaagaactaataccttgctcatggtgtttccttatagatgtttgaatgggcgatgccccgttgcttgttgacactttattcacaatcctgccacagagatagcgcaataaatcgaagcctatgttcgaatttattgaacaacgcatagaaagccgcgatgtggtactctatatctatcatttaaaagaaaattaatcaggcagactactgcccactaacgttatgacagaacaacaaaaattgacctttacggccttgcagcagcggctggattcgctgatgctgcgtgacagactgcgtttttctcgccgtctgcacggcgtgaagaaggttaaaaatcctgatgcacaacaggccattttccaggagatggcgaaagagattgaccaggcggcagggaaagtcctgctgcgtgaagcggcacgaccggaaattacttatcctgacaatttaccggttagtcagaaaaaacaggacattctcgaagcgattcgtgatcaccaggtggtgatcgtcgccggggaaacgggttctggtaaaacgactcagttaccgaaaatctgtatggagctggggcgcgggattaaaggactgatcggccatacccagccgcgtcgtctggcggcaagaacagtggcgaaccgtattgcggaagagctgaaaacggagccgggcggttgcatcggttacaaagtgcgtttcagcgatcacgtaagtgataacacgatggtcaagctgatgaccgacggtatcctgctggcggagatccagcaagaccgcctgctgatgcagtacgacactatcattattgacgaagcgcacgaacgcagcctgaatatcgattttttgctcggctatttgaaagagttgctgccgcggcgtcctgacctaaaaatcattatcacttccgcgactatcgacccggaacgctttagccgccactttaataatgcgccgattattgaagtctccggtcggacctatccggtggaagtgcgctatcgcccgattgttgaagaagccgatgacaccgagcgcgatcagttgcaggcgatttttgacgccgtagacgaactgagtcaggaaagccatggcgacattctgatctttatgagcggcgagcgggaaatccgcgataccgccgatgcgctgaacaagctgaacttacgccataccgaaatcttgccgctttatgcgcggcttagcaacagcgaacaaaatagggtattccagagccacagcggacggcgcattgtgctggcgaccaacgtcgcggaaacgagcctgaccgtaccggggattaaatacgttatcgaccccggtacagcgcgtatcagccgctacagctatcgcaccaaagtgcagcgtttgccgattgagccgatttcccaggcgtctgccaatcagcgtaaaggccgctgtggtcgtgtgtccgaagggatctgtattcgtctctattccgaagacgatttcctcagccgcccggagtttaccgatccggagattctgcgtaccaacctggccagcgttattttgcagatgaccgcgctggggctgggcgatatcgctgcgttcccgtttgtcgaagcaccggataaacgcaatatccaggatggcgtgcgtctgctcgaagagctgggcgcgatcaccactgatgaacaggccagcgcctataaactgacgccgctcggtcgccagctcagccagttgcctgtcgacccacgtctggcgcgtatggtgctggaagcgcaaaaacatggctgcgtgcgtgaggcgatgattatcacgtccgcgctctccattcaggatccgcgcgaacgtccgatggacaaacagcaggcaagcgacgaaaaacatcgtcgcttccacgacaaagagtctgactttctcgcgtttgtgaatctgtggaattatcttggcgagcagcaaaaggcgctttcttccaacgccttccgtcgcctgtgtcgtaccgattatctcaactatctgcgcgtgcgcgaatggcaggatatctacacccagttgcgtcaggtggtgaaagaacttggcattccggttaacagcgaaccggcggagtatcgcgaaattcacattgcgttgctgaccggtttactttcccatatcggcatgaaagatgccgataaacaagaatataccggcgcacgtaacgcgcgtttctccatcttccccggttctggtttattcaaaaaaccgcctaaatgggtaatggtggcggaactggtagaaaccagccgcctgtgggggcgcattgctgcgcgtatcgacccggaatgggtggagccagttgctcagcatttgattaaacgcacctacagcgaaccgcactgggaacgggcgcagggcgcggtgatggcaacggaaaaagtcactgtttatggtttgccgattgttgccgcgcgcaaggtcaactacagccagatcgatccggcgttatgtcgtgaactctttattcgccacgcgctggtggaaggtgactggcagacgcgtcacgcattcttccgtgaaaacctgaaactacgggcggaagtagaagagctggaacacaaaagtcgtcgccgcgatattctggttgatgacgaaacgttgtttgagttctacgaccagcgcatcagccacgatgtaatctccgctcgccacttcgacagctggtggaaaaaagtcagccgcgaaacgcctgatttgctcaactttgaaaaaagcatgttgatcaaagagggcgcagaaaaaatcagcaagctggattacccgaacttctggcatcagggcaatctcaagctgcgtttgagctatcagtttgagcccggcgcggatgctgacggtgtgaccgtacatattccgctgccgttacttaaccaggttgaggaaagcgggtttgaatggcagatccccggtctgcgccgcgaactggtgattgctctgattaaaagcttgccgaaaccggtacgccgtaattttgtacccgcgccaaactatgccgaagcgtttttaggccgcgtcaaaccgctggagttaccgttgctcgacagccttgagcgcgagttacggcggatgaccggcgttaccgttgaccgcgaagactggcactgggatcaggtgcccgatcacctgaaaattaccttccgcgtggtggatgacaaaaacaagaagctaaaagaagggcgcagcctacaagatctgaaagatgcgctgaaaggcaaagtgcaggaaacgctatctgcggtggcggatgacggtatcgagcagagcggcttacatatctggagttttggtcagctgccggaaagctacgaacagaagcgtggcaactacaaagtgaaggcgtggccggcgctggtggatgagcgcgacagtgtggcgatcaaactgtttgataacccgctggagcaaaagcaggcaatgtggaacggtcttcgccgtctactgctgctgaatattccaagcccaatcaaatatttacatgaaaagttaccgaacaaagccaagctgggactgtactttaacccgtatggcaaagtgctggagctgatcgacgactgtatctcctgcggtgtggataaattgatcgacgccaatggtggcccggtctggacggaagaaggctttgctgcgctgcatgaaaaagtgcgtgccgaactgaacgacacggtggtggatattgcgaagcaggtcgagcaaatccttacggcagtgttcaatatcaacaaacgtctgaaagggcgggtggatatgaccatggcgctggggctttctgacattaaagcgcagatgggcgggttggtatatcgcggttttgtcactggtaacggcttcaaacggctgggcgacacgctgcgatatttgcaggcgattgaaaaacggctggaaaaactggcggttgatccacatcgcgaccgtgcgcagatgctgaaagtcgaaaacgtccagcaggcgtggcagcaatggatcaacaaactgccgcccgcacgtcgtgaggatgaagacgtgaaagagatccgttggatgatagaagagttgcgcgttagttacttcgctcaacaacttggtacgccttatccgattagtgataagcgtattttgcaggcgatggagcagattagcggttaaccctgctatttgcctgataaagaaaaaacccggtaagcatttagcgccgggttttttattaattctaaaacggtaagggtaaaaattcaggaattcagaaaaatacaattctctgctgcaagatgaataatgtttatctacagcatttccttaaaagatatgtcaggcttgcggagtggcggttaaggacatacgatttcctcctttcagagtgctccgcttctcactattatctcacgcagtattcttaagggaacgataaggaggaaccatgaacattaccccgtttccgacgcttagcccggcaactatagatgccataaatgttatcggacagtggctggcgcaggatgatttctccggtgaggtgccgtatcaggccgattgcgtgatccttgcaggcaatgcggttatgccgactatcgatgcggcatgtaagattgcccgcgatcagcaaattcctttactgattagtggtggtatcggtcacagcacaacttttttgtatagcgccatcgcacagcatccgcactacaacactatccgcaccactggcagagcagaagcgaccatcctggcggatatcgctcatcagttctggcacattccgcatgaaaaaatctggattgaagaccagagtacaaactgcggtgaaaacgcacgctttagcatcgcgctattgaatcaggccgtagaacgagttcatacggctatcgttgttcaggaccccaccatgcagcggcgcacgatggcgacgttccgccgtatgactggggacaatcccgatgcaccacgctggttaagttatcccggattcgttcctcagttaggaaataacgcagacagtgtaatctttattaatcagttacaaggattatggccagttgagcgttatctcagtctactcactggcgagctgccgcgtttacgcgatgatagcgatggctacggtccccgcgggcgagattttatcgttcacgttgattttccggcagaagtcatccatgcatggcaaacgctgaaacatgatgcggtgctcatcgaggcgatggaaagtcgcagcttacgttaaaaattgcccgtttgtgaaccacttgtttgcaaacgggcatgactcctgacttttatttctgccttttattccttttacacttgtttttatgaagcccttcacagaattgtcctttcacgattccgtctctctgatgattgatgttaattaacaatgtattcaccgaaaacaaacatataaatcacaggagtcgcccatgagtgtacccgttcaacatcctatgtatatcgatggacagtttgttacctggcgtggagacgcatggattgatgtggtaaaccctgctacagaggctgtcatttcccgcatacccgatggtcaggccgaggatgcccgtaaggcaatcgatgcagcagaacgtgcacaaccagaatgggaagcgttgcctgctattgaacgcgccagttggttgcgcaaaatctccgccgggatccgcgaacgcgccagtgaaatcagtgcgctgattgttgaagaagggggcaagatccagcagctggctgaagtcgaagtggcttttactgccgactatatcgattacatggcggagtgggcacggcgttacgagggcgagattattcaaagcgatcgtccaggagaaaatattcttttgtttaaacgtgcgcttggtgtgactaccggcattctgccgtggaacttcccgttcttcctcattgcccgcaaaatggctcccgctcttttgaccggtaataccatcgtcattaaacctagtgaatttacgccaaacaatgcgattgcattcgccaaaatcgtcgatgaaataggccttccgcgcggcgtgtttaaccttgtactggggcgtggtgaaaccgttgggcaagaactggcgggtaacccaaaggtcgcaatggtcagtatgacaggcagcgtctctgcaggtgagaagatcatggcgactgcggcgaaaaacatcaccaaagtgtgtctggaattggggggtaaagcaccagctatcgtaatggacgatgccgatcttgaactggcagtcaaagccatcgttgatagtcgcgtcattaatagtgggcaagtgtgtaactgtgcagaacgtgtttatgtacagaaaggcatttatgatcagttcgtcaatcggctgggtgaagcgatgcaggcggttcaatttggtaaccccgctgaacgcaacgacattgcgatggggccgttgattaacgccgcggcgctggaaagggtcgagcaaaaagtggcgcgcgcagtagaagaaggggcgagagtggcgttcggtggcaaagcggtagaggggaaaggatattattatccgccgacattgctgctggatgttcgccaggaaatgagcattatgcatgaggaaacctttggcccggtgctgccagttgtcgcatttgacacgctggaagatgctatcagtatggctaatgacagtgattacggcctgaccagtagtatctatacccaaaatctgaacgtcgcgatgaaagccattaaagggctgaagtttggtgaaacttacatcaaccgtgaaaacttcgaagctatgcaaggcttccacgccggatggcgtaaatccggtattggcggcgcagatggtaaacatggcttgcatgaatatctgcagacccaggtggtttatttacagtcttaatgagtgaaagaggcggaggttttttcctccgcctgtgcgcgtcagagtttagcgaatttttcgagggtgcgaataagctgtgtgacgaagccatattcgttatcgtaccaggcgaccgttttcaccagttgtaaatcgcccacggcggtaatttccgtttgcgtggcatcaaacaccgaaccgaaatggctgccaatgatatcggaagagactatttcttcatcggtataaccaaatgactcgttattggtggttgcttgtttaagtgcgttattcacctcttcggcagtcacttttttccgagaatcgataccagttcagtgaccgaacctgttttcaccggcacgcgttgcgcatgacctttcagtttgccgctcagttccgggatcaccagaccaatggcttttgccgcccccgtagtgtggggaatgatattttctgccgctgcgcgtgaagcacgtaaatctttaccacgcgggccatccaccagtgactgggtgccagtataggcatgaatggtcgtcatcgtgccgacttctatcccgaaactgtcatgcaaggctttggccatcggcgcaagacagttagtggtgcatgacgccacggaaacaatggtgtcgttgccatccagagtgtcgtcattgacgttataaacgatagttttcatttcaccggcaggggcggaaatcaacaccttcttcgcaccagcatcaagatgcgcctgcgatttctcggcggaggtataaaagccagtacattcgacaatgatttctgcacctttcgctttccacggaatatttttagcctctttttcggcgtaaaccgcgatacttttcccatcaacgataagtgaatcttccgtaaaatcaacgctccaggggaatggtccgtagtttgaatcatgtttcagcaggtaggcgagaatttatggggaagtgagatcattaatagcgacaacgtctatgttgcttttgacttcaagtaatcgacccaacaccagtcgaccgatacgaccaaaaccgttaataccaactttactcatggttttctcctgtcaggaacgttcggatgaaaattgatcctttccaagcttagaccaggatggcgggatgggcaatctccattctcacagtgaaacgtaacgtactgaaaacgggtgaacaatatttaatgaaattttgagaaaagcccgttatgttaacggaaaattatgttaaagcaggaaatgttatggaaaataaatatagtaggttacaaatcagcattcactggctggtctttttactggttatcgcagcgtattgcgcaatggagtttcgtggtttcttcccacgtagcgatcggccactcatcaacatgattcatgtttcctgtggcatcagtattctcgtgctgatggtcgttcgtcttttgttaaggctgaaatacccaaccccgccgattatacctaagccaaaaccgatgatgacgggactggcgcatttgggacatttggtgatttatctcctgtttattgcgctgccagtgattggtttggtgatgatgtataaccggggcaacccgtggtttgcgtttggtttgacgatgccttacgctagtgaggccaatttcgaacgggtagatagcttaaagagctggcatgaaacgctggcgaatctgggatattttgtcatcgggttgcacgctgcggctgcactggcacaccactatttctggaaggacaacacacttctacgcatgatgccgcgtaaacgttcctgaaggatatttaaagaaaacgcctgtactaaaaccgacccgtggtacaggcgaagaatacgggtctacatcggaagcgcctattatatttatttgtatgataaataaaaccataatccttgcccatacgtccatctggcttatttttaatcaattcacccgatctttgatctcatcaacggtatcaaaataaaccagcgtataacgttcaaatcgaacataagattcgataaaccatggaggttatatgaaaaaactggcacttattttgtttatgggaacgcttgtttccttttatgccgatgccgggcgcaaaccctgttctggtagcaaaggggggatcagtcactgtacggcaggcggcaaatttgtctgtaatgatggttctattagtgcaagcaaaaaaacatgcactaactgaagtgtaaaaggggtgccatgagaaaatgaatctgctagtcaaatgcgcggggaaaatccccgcgcttgcccttacctggacgtgcaggccatgagcgcagcaacctccttatcaccgtcccggaaccgcagttcgtagagcgtttgtcgggtcaggagtgtgaatgtcagaatcgtaatgcagataatgagcagacacaccaccagagggttgtgcttcatagcctttctccttgccggatggcgggtaagaggctaagatctgaattgctaggttcattcgttggcctcggttgatagaaatatcggtcggggccttcgtctttctgattcccggttagcctgaaaacagaaagtctcaggcacccgcaggcatcctatgaggtttccttagggacgaaaataatcacttcacgaaattgcgtgctgttttccagaatttttcgtcattcgggttagccagtttagccattcgttactctcttcattccaatagcattaattttctatgcaataattgttgtaaaaatgtgacgcaaagaggtttttggtcataagtaattaccgtcaagtgccgatgactttctatcaggagtaaacctggacgagagacaacggtaatgaatacaactcccagtcagcgattaggttttttgcatcacatcaggttggttccgttatttgcctgcattctaggcggtatcttagttctattcgcattaagtagtgccctggctggctatttcctctggcaggccgatcgcgatcagcgtgatgttactgcggagattgagattcggaccgggttagcgaacagtagtgattttttgcgtagtgcccggatcaatatgattcaggccggggctgcgagtcgtattgcggaaatggaagcaatgaagcgaaatattgcgcaagccgaaagcgagattaaacagagccagcaaggttatcgtgcttatcagaatcgaccggtgaaaacacctgctgatgaagccctcgacactgaattaaatcaacgctttcaggcttatatcacgggtatgcaacctatgttgaaatatgccaaaaatggcatgtttgaagcgattatcaatcatgaaagtgagcagatccgaccgctggataatgcttataccgatattttgaacaaagccgttaagatacgtagcaccagagccaaccaactggcggaactggcccatcagcgcacccgcctgggtgggatgttcatgattggcgcgtttgtgcttgccctggtcatgacgctgataacatttatggtgctacgtcggatcgtcattcgtccactgcaacatgccgcacaacggattgaaaaaatcgccagtggcgatctgacgatgaatgatgaaccggcgggtcgtaatgaaatcggtcgcttaagtcgtcatttacagcaaatgcagcatagtctggggatgacagtagggactgttcgacagggcgcggaagagatttatcgtggcaccagcgaaattagtgctggcaatgcggacctgagttctcgcaccgaagaacaagcggcggctatcgaacaaactgccgccagcatggagcaactcactgcgacggtgaaacagaatgcggataacgcgcatcatgccagcaaactggcgcaagaggcttctattaaagccagcgatggcgggcagacggtttccggtgtagtaaaaacgatgggcgctatctccacgagtagcaagaaaatttctgagatcaccgccgtcatcaacagtattgctttccagacgaatattctggcactgaatgctgccgttgaagccgcgcgagcgggtgagcaagggcgtggatttgccgttgtcgccagcgaagtacggacactcgcaagtcgcagcgctcaggcggcgaaagagattgaaggcttgatcagtgaaagtgtcaggttaattgacctggggagcgatgaggtggcaacggccgggaaaaccatgagcactattgttgatgccgtcgcgagtgtcacacatatcatgcaggaaatcgccgccgccagcgatgaacaaagtagaggcataacgcaggttagccaggcgatttctgaaatggataaggtgacgcaacagaatgcttctctggtagaagaggccagtgcggcggcggtgtcccttgaagaacaggcggcacgattaactgaggcggtggatgtattccgtctgcacaaacattctgtgagcgcagaacctcgcggagcgggtgaaccagttagtttcgctacggtgtgaaaatgttcaaggagggatcgacagatcccttcacctttcagaacggcatactttttcgaatagcgttaatcatcaactggcaaccagaagagaacgtcgcatctacgcgggtcagtattccaatcggttcgcctgcaccatgtcccggaacaggcagggccaccagcgtggcatgacgcaggtcgtcttttacagcgccagaagggacaaaccacacgtaatcgtattcaaccgtaagttgacgagataggctagcagacagcgtttcgatacaaccgctaggaattttacagccctggctctgcactaatgcatcactatgctggcgtggcgcagtgccttctggacttacaacgaccggccattccagcacccggcttagcgttacgttctcctgaagtagcgggtgattagggcggacaaccagcttcaagctttcaagaaacagcagttcgtaattaagcccggtcatcagttcaggatcactcatccgaccaatgccgatatcgatttccccggtttttaaacccgccagaatcatagggttactcattgtcgcaacttgcaaggtcgtctctttttgttgctgatgaaactgacctataacgctaggtaatatccccagtgccgcagtaggtagtgcaccaaccctgacgacatcattattaagaccttctttacgatgaaggctccgtccggcagtgttgatggcgtcaagaactctgactgcatgcgttaaaaattgttcgccgggtaaggtaagttgcgccccctgacgaccacgctcaaacaagcgagcgccagtcagctgctccagttcattcaatgtcttagagagcgcaggttgactcaaattaagggtttcagccgcgcgccccaaagttccttgttgtgcgacagctacgaatgtatgaaggtggcgcaaacggatgcgctgactaaacagactatttttttccataagcgatgttaaaaacgaagcggtgtcgctgacaagtgaagttgtttgattatgataacttgattgcaaaatattattaacaattaaagcaattatgttacagcaaaatggataatattgatgttttcgcggcgagatcacagtttgtaaattcttcccgcaagagtgaatgcggttacctacactccagattactgaccactggaggcagacactatggcgaacagcatcacggcggatgagattcgggaacagtttagccaggcaatgagtgccatgtaccagcaagaagttccgcaatatggcacgctgctggaactggtagctgatgtgaatctggctgtgctggaaaacaatcctcaactgcacgaaaaaatggtaaatgcagacgagctggcgcgactgaatgttgaacgtcatggggcgattcgcgttgggactgcacaagagcttgctactcttcggcggatgtttgccattatggggatgtacccggtgagctattacgatctcagccaggcaggggtgccggtacatagcacagcatttcggcccattgatgatgcttctctggcgcgtaatcccttccgcgtttttacctccttactccgccttgagcttatcgagaacgaaattttgcgccagaaagcggcggagattctgcgtcagcgcgatatcttcaccccacgttgtcgacaactgttagaggaatatgagcagcagggcggctttaacgaaacacaggcacaggagtttgtgcaggaagccctggaaacgtttcgctggcaccagagtgcaacggtagatgaagaaacctatcgcgcattgcacaacgaacatcggttgattgctgatgtggtctgttttcctggatgccatatcaaccacctgacgccacgtacgctggatattgaccgggtgcagagcatgatgcctgaatgcggaattgaacccaaaattctcatcgaggggccgccgcgccgcgaggtaccgattttactacgccagaccagctttaaagcactggaagagacggtgttgtttgcggggcagaaacagggcacgcataccgcgcgctttggtgaaattgagcagcgtggcgtggcattaacgccgaaagggcgacaactgtatgatgatcttctgcgtaacgctggaaccgggcaggataatctcactcaccaaatgcatttacaggaaaccttccgcacttttcctgacagtgagtttttaatgcgtcagcaagggttggcatggttccggtaccgtctgacgcctagcggtgaggcgcatcgtcaggcgattcatcctggagacgatccacagcccttaattgaacgtggttgggtagtggcgcaacccatcacctatgaagatttcttgcccgttagcgcggcggggatcttccagagtaatctgggtaatgaaacgcagacacgcagtcacggtaatgccagtcgcgaagcatttgagcaggcgttgggttgtccggttttggatgagttccagctttaccaggaagcggaagaacgcagtaaacgtcgctgtggtttgctttaaaatctgaccatccgcctttgcaaaaatttgcctgattttacaaacgaatcaggctcatcccatcgacataaaaaaaatgccgatttatgcatattctctcagttcaacaattggattattaataaatattgtctagagtgagcggtcataaataagcactttcttgccgctgaaaacgaccagcgcgggaccattcacaacaccagaaggactcactttcaggtatggatcgtagacgatttattaaaggttcaatggctatggccgccgtgtgcggtaccagcggcattgcttctcttttttctcaggcggcattcgcggcagattctgatattgccgacgggcaaacccagcgttttgacttctccattctacagagtatggcgcacgacttagcgcaaacagcgtggcgtggtgcgcctcgtccgttacctgacacgctggcgacaatgacgccgcaggcttataacagtattcaatacgacgccgaaaaaagcctctggcataacgttgagaaccgtcaactggacgctcagttcttccatatgggaatgggattccgtcgccgcgttcgtatgttttctgtagatccagcaacacatctggcgcgtgaaattcactttcgcccggagttgttcaaatacaacgatgcaggtgttgatacaaaacaattagaagggcaaagcgatctcggctttgccggttttcgcgtgtttaaagcccccgaactggcgcgccgtgatgtagtaagttttctcggcgcgagttatttccgcgccgttgatgatacatatcaatacggtttgagcgcccgcggcctggcgatcgacacttacaccgacagtaaagaagagttccccgactttaccgccttctggtttgatacggtaaaaccgggggcaactacctttaccgtttatgcgttgctcgatagcgccagcattactggtgcctataagttcactatccattgtgagaaaagtcaggtgattatggatgtggaaaatcacctgtatgcgcgcaaagacattaaacagctgggcattgcgccgatgaccagtatgttcagctgcggtactaatgaacgtcggatgtgcgatacaattcatccgcaaattcatgactctgatcgtctgtccatgtggcggggcaacggcgagtggatttgccgtccgctgaataatccgcaaaaattgcagttcaatgcttacaccgacaacaacccgaaagggtttggtttattgcaactggatcgtgacttctcccattatcaggacattatgggctggtataacaaacgcccaagtctgtgggtggaaccgcgtaacaagtggggtaagggcaccatcggcctgatggaaatcccaacaacgggcgaaacgctggataacattgtctgcttctggcagccagaaaaagctgtaaaagcaggtgatgagtttgcattccagtatcgtctgtactggagtgcgcaaccgcctgttcattgcccattagcgcgcgttatggcgacgcgtaccggcatgggcggtttcagcgaaggttgggcgccaggtgaacactatcccgaaaaatgggcgcgtcgttttgccgtcgatttcgttggtggtgatctgaaagctgccgcgccaaaaggcattgagccggtgattacgctttccagtggggaagcgaagcaaatcgaaattctctatattgaacccatcgatggttatcgtattcagtttgactggtatccgactagcgactccactgatccggtcgatatgcggatgtatctacgttgtcagggggacgctatcagtgaaacatggctgtatcagtatttcccgccagcgccggataaacgtcagtatgttgacgaccgcgtgatgagttaatcgttttttcttcggcaccttcttcgggaggtgccgtctggttaaacacgatcccgctcgcatttttccctaagttaaatgagtaatctgatggtgtgtatttcagatacaccttgtcagccactaacagggagtgcgtatgtttccagaataccgagatttaatatcccgtctgaaaaacgaaaatcctcgctttatgtccttgttcgataaacacaataaacttgatcatgaaattgccagaaaggaaggttccgacggtcgagggtacaatgcggaagtggtccgcatgaaaaaacaaaagctacagttaaaagatgagatgctcaaaatcctgcagcaggagagcgtcaaagaggtgtaaactttcctaagccgccagccaggcggcttttttaacaactgcatggattgactggagataagatgactgaaacgataaaagtaagcgaaagtcttgaattacatgctgttgcagaaaatcacgtcaaacctctttatcagttaatctgtaaaaataaaacctggttacagcagagcctaaactggccgcagtttgttcaaagtgaagaggacacgcgaaaaacggtgcagggtaatgtgatgttgcatcaacgcggctatgccaaaatgttcatgattttcaaagaagatgaacttatcggcgttatcagctttaatcgtattgaaccactgaataaaaccgctgaaatgggctactggctggacgaatctcatcaggggcaggggatcatttctcaggcgctgcaggcattgattcatcattacgcccagtctggtgaacttagacgcttcgtgatcaaatgtcgggtggacaatccgcaaagcaaccaggtcgctttgcgcaatggttttatccttgaaggttgcctgaaacaggctgagttcctgaatgatgcctatgatgatgtgaacttatacgcgcgtattatcgatagtcaataatcacaataaccctgccagcggcgttcgcgtaatgcgctcctcgccgttaatgacttttggaccacggacatgaaccgtgtcgccatcaaaggcttcaacgacggcgtggtcggttaactccacatggttttcaattatcaccgcacctgtaatacggctctcaccttgtatgacaacgtgctcgtcgagcagaatcggtccgccacgtaccacggcatttccgccaaccaagacatgatgttttaacacacaattaccttccacaatggcatattccgccacctggctactgtaatgaatcgtcggaatggcatcttcttctatgccagctttcacctgcgcgtgaccgtagactttagcgcaatcgcatagccagacattgttctcttcattaccttcaatactggcaaaatcaaaaacttcggcgcgatgttcaataaaagcataccggacgacggcatcgccataaatttgtgcctggtggacaatacggctggcgctaacccttgcgcgatcataaatttggagcaggagttgatggtcgggcgttaagccttgtgcggcgacgatcatagaatgttgatcaattaaggcgtgaccaaatattctacattgcccgtaaactaaactgtcatgaatggtgacgctgtcacttatatatgcaccctggctgatttcactattatcgatccagacgttatccgttgcgtaaacctctccccacagcacgctggtgccggtgatacgcgtattaccggaaatcaccgctccgccgaacgcaatagcattctggtcgtaaatccagcaatttccttcttgtgctaacaccgtttcgcgatcgatccagccgccagcggttcctgctatcacatcgttaaaatcgctaatggcgataatctgccgtaataacacattttttttagtgccatcttcctgataactaaaggctcgctgttcttcacttagacgatatttgcgcatagcgttttcccacaggtgacttactataaccgtagcaaattctgcggctctggctatgctcgagaaaattccataaaatgcatttcaaatatactttataaattaaacaaaatgagtaagaagatgcagagcgataaagtgctcaatttgccggcaggctactttggtattgtgttggggacgatagggatgggatttgcctggcgctatgccagccaggtttggcaggtcagccactggttaggggatgggctggtgattctggcgatgatcatctggggattattgactagcgcatttattgcccgactcatacgctttccgcatagcgtgctggcggaagttcgccatccagtgctgagcagttttgtgagtttgtttccggcaacgacgatgctggtggcgattggttttgttccgtggtttcgcccactggcggtgtgcctgttcagttttggtgtcgtggttcagttggcttatgccgcctggcaaactgcgggattatggcgcggatctcaccctgaagaagctaccacgcctggactgtatctgccgacagttgccaacaactttatcagcgcaatggcctgtggtgcgttgggctacaccgacgccggtctggtgtttttaggcgcaggcgttttcagttggctaagccttgaaccggtgatcttgcagcgtctgcgcagtagcggagaattacccacggcactgcggacaagtctcggcattcagctcgctcctgcgctggtggcttgtagtgcctggctgagcgtcaacggcggcgagggtgacacgctggcgaaaatgcttttcggttatggactgctgcaactgctgtttatgctacgtctgatgccatggtatctctcccagccatttaatgctagtttctggagtttcagcttcggcgtatctgcactggcaaccaccggtttgcatctggggagtggcagcgataatggatttttccatacgctggcggtgccgctgtttatctttaccaattttattattgcaatactgctcatccgtacttttgcgcttctgatgcagggaaaattgttagtcagaaccgagcgcgccgttttaatgaaagcagaggacaaagaatgatcattcgtgacgaaaactattttactgataaatatgaattaacccgcacacactctgaagtactggaagcggtgaaagtggttaaaccgggtaaaacgctggatctgggctgtggcaatggtcgtaacagtctttacctggcagccaatggttatgatgttgacgcatgggataaaaatgccatgagtatcgccaacgtcgagcgcattaaatccattgaaaatctggataatttacacacccgagtcgttgatctgaataacctcacatttgatagacagtacgattttattcttagcactgtggtgctgatgttccttgaggctaaaaccatccccgggttgattgccaatatgcaacgttgcactaaacctggtggttacaacctgattgtggcggcgatggataccgctgattatccatgtaccgtcggcttcccgtttgccttcaaagagggagaattacgtcgatattacgaaggctgggagagggtgaaatacaatgaagacgtcggcgagctgcaccgcaccgacgccaacggtaatcgtattaaactgcgtttcgccacgatgctggcacgtaaaaaatgacccggtaagcacaaaacgcgtgaaaattccccacgctgagatgatttactgttcttcttttcggtaagcatattttttatcgaagggatgtgaaattaatcacagtagtcgaagtttttagcagcttaacttactgaaatttaagtactgatgattgacttagcccctttttcggcattgactatgtcgtctgaaaaggggctgaaaaatttattttcaccaacactttttttgccacaacacgaagcggcgctttttgctataacttagaaagtaatataatcatctcaggaaactattcatgcgtaccacaagttttgcgaaagttgcagctttatgcggcttattggctctgtctggttgtgcatctaaaatcacccagccagataaatattctggttttttaaacaattactctgatttaaaagaaacaaccagcgctacaggtaaacctgttttacgttgggtagacccgagttttgatcaaagcaaatatgacagcatcgtctggaacccaatcacttattatccggtaccgaaaccgagcacccaggtagggcagaaagttctggataaaattttgaactataccaacaccgaaatgaaagaagcgatagcgcagcgtaaaccactggttaccaccgctgggccgcgtagtctgattttccgtggggccattaccggtgtagataccagcaaagaagggctgcaattctatgaagtggttcctgttgcattagtggttgcggggacgcaaatggctacaggccaccgtaccatggatactcgcctctattttgaaggtgagctgattgatgcagcgactaataaaccggttatcaaagtcgttcgtcagggcgaaggtaaagacctgaataacgaaagtacgccaatggctttcgaaaatattaaacaagttattgatgacatggcgaccgatgccaccatgtttgacgttaacaaaaagtaattccagacgcgccatcgttagatggcgctttttatccggtgcgccgtaaaaccccatccttcagggcggggatataaggcgcggttttccacctgaccaggtgtttgctgttgttcaatgtattggcggatgacggatattggcgcacctccgcagctactggcaaaatagccaggactccacaaaacgcctttgtagtaatacctgaatgcaatatctggtcgatctcgtcgcagtcacctacccgatacgcctttgaggctgtttaccagactggatatcgccagtttgggaggatagttaattaacaaatggacgtgatctggttcgccatccatttcaaccagttcagcttcaaaatcagcacatacatttgaaaagtaagtgcgtagtttttctgtcgcgtcatggtcaaaaatctggcgtcggtatctggtgacaaagagcaggtgaacatgcatcaggaaaacacaatgccttccacgccggatatcggtttcttttttcacagaccaaagtatcatttgacctgtgaaacgattacaggcatttaaattccagttaagacccggtggtcaacaggagtgtgaaatgaggcgcttcgcaggcgcatgtcgtttcgttttcaatcgtgctctggcacgtcagaatgagaatcatgaggccggtaataaatacatcccttacgggaaaatggcttcctggctggttgagtggaaaaatgccactgaaacgcaatggcttaaagattctcccagtcagccattgcaacagagtctgaaagaccttgagcgggcttacaaaaacttcttccggaagcgggctgcttttccccgattcaaaaagcggggacagaatgatgcattccgctacccgcagggcgttaagctcgatcaggaaaacagccgtatttttctgccgaaactgggctggatgcgctaccggaacagccgtcaggtcacgggtgttgtgaaaaatgtcactgtcagccagtcctgcggtaagtggtacatcagtattcagacagaaagtgaagtaagtactccggttcaccctagtgcaagtatggtcgggctggatgctggcgtggctaaactcgccacgctgagtgatggcacagtctttgagcctgtaaacagttttcagaaaaaccagaagaagctggcgagacttcagcgacagttaagccgcaaggtcaaattcagcaacaactggcaaaagcagaaacgcaaaatacagcgactgcattcctgtatcgcaaatatccgcagggactaccttcacaaagtcacaacggccgtcagcaaaaaccacgcaatgatagtcattgaggatttgaaggtcagcaacatgagtaagagtgcagcgggtacggtcagccagccggggcgcaatgtccgggcaaaaagtggtttaaaccgtagcatactggatcagggctggtatgaaatgcgccgccagcttgcgtataagcagctctggcgtggcggtcaggtgcttgctgttccgccagcgtatacaagccagcgttgcgcgtactgtggtcatacagcgaaagagaaccgcctgagtcaaagtaaattcagatgccaggtatgtggatatacagcgaacgccgatgtaaatggcgctcgcaacattttagcggcggggcacgccgttcttgcctgtggagagatggtgcagagtggccgcccgttgaagcaggaacccaccgaaatgattcaggcgacagcctgaacgtagcagggatccacgtccttcagggcgtggaggatgtcaatatcggtttctgtcagcgattaaattcaacaccacgtaacaaacgcctccggcaattaatccccaaaacgcagaaccaatcccgaccagcgtcaatccacttgccgttaccagaaatgccaccaccgccgcgtctcgctcacgctcattatgcagcgcctgatacaaactgccgccgatggtacttaacagcgccagacctgccagcatctggatccaacttacgggcagggcagccatcatcccggtaatggcactaccaaacagacctgcgagcaaatagaaaatgcctgcaacggcagcggccagccaacgttgatctttatccggatgcgcttccgggctttggcaaatagccgcggtgattgccgcaataccgacggaataaacgccgaaaggggaaaaaaccagtgccagcaatccagtaaatacaattaatgggctaacaggagcgctatatccagctgctttcattgctgcgatacccggtgcgttttggcttgccatcgtcaccagaaaaagggggagtgcaacgctcaggctgtgagcaaagctaaaatcaggggtaatataagtggggagaacgggtttaaagacaacatcagttgtgacaacgtcaccttgcgcgatgacgatcacgatcccaataatcatcgcggcaattaccgcatagcgcggcgcaacggccttggttgccagccataccagcaacatacttccacacaacgtaaattgaccgtccagactggcaaacgcctgtaaaccaaagcgtaataaaatcccggcaagcattgccgccgcaaggctgtgcggaataatgcgcatcagacgagcaaagagtcccgttatgccgcagaggactattagcgcgttggtgacaataaaaacgccgatggcttcgttaagtgttagtccctgcaatccggtgaccaacaaagccgcgccaggcgtactccatgcggtgagaacaggtacgcgataccataatgtcagagtcagcgtactgacgcccattgccagccccagcgccgtcatccagccagagatttgtgcagtggtggctccggcgacaatcgctgcttgccagattattgccgcactactggcgtagccaattaataccgccagaaaccccgccagtagcgtgggtggaggaatagaaaacagacgcatagtcacctcgtgcgttatagcgtacaggcaccgtagcatttgtccgttataacgcacaagtgataaacttccgttttgccggaggagtcgcatggaaaatctcgctcgctttttatccaccacacttaaacaactacgccagcagcgcggctggagtcttagccgactggcagaagcgacgggcgtttctaaagcaatgttagggcagattgagcgtaatgagtccagtccgacggtcgcgacattatggaaaattgccaccgggttgaacgtaccatttagtacatttatttctccgccgcagtccgctacgcctagtgtttatgatccacaacagcaggcgatggtgatcactagcctgtttccttatgatccacaactctgctttgaacacttcagcattcagatggcatctggtgcaataagcgaaagcacgccccatgagaagggggtaatcgaacatgtcgtcgtcattgatggacaacttgatctgtgcgttgatggggaatggcagacccttaattgtggggaaggcgttcgatttgctgcagacgtcacgcatatctatcgtaatggtggggagcaaaccgtacattttcattccctcatccattacccgcgcagttaagcgggaaaactatttcgcaacgtcgcgcttgtggctaaaatagccgccatttttcagctactggataagaatgtgaccgtatcttctcatcgacttgaactgttaagcccggcacgcgatgccgccattgcccgcgaagctattttgcacggtgccgatgctgtttatatcggcggccctggttttggtgcccgtcataatgccagtaatagcttgaaagatattgccgagctggtgccgtttgcccatcgttatggtgcaaaaattttcgtcacgcttaacaccattttgcatgatgatgagctggaacccgcgcaacggctgattactgacctctaccagaccggtgtcgatgcgctgattgttcaggatatggggattctggaacttgatattccgccgattgaactgcacgccagtacgcagtgcgacattcgtacagttgaaaaagcgaagttcctctctgatgttggcttcacgcagattgtgctggcgcgagagctgaatcttgatcagatccgcgcgattcaccaggctacggacgcgaccattgaattctttattcatggggcactgtgcgtggcctatagcggtcagtgctacatttctcatgcgcaaacagggcgtagcgccaaccgtggcgattgcagccaggcgtgccgtttgccatacacattgaaagacgatcaggggcgggtggtttcctatgaaaaacatctgctgagcatgaaagataacgatcagactgccaacctcggcgcgctgattgatgctggtgtacgctccttcaagattgaagggcgttacaaagatatgagctacgtgaagaatatcaccgcccattatcgccagatgcttgatgccattattgaagaacgtggcgatctggcgcgcgctagtagtggtcgtactgaacatttctttgttccaagcacggaaaagactttccaccgtggtagcacagattattttgtgaatgcccgtaaaggcgatattggcgcgttcgatagcccgaaatttatcggcctgccggtaggcgaagtagtgaaagtggcgaaagatcatctcgatgttgccgttaccgagccactggcaaatggcgatggcctgaacgtgttgattaaacgtgaagtcgtcggttttcgtgccaatacggtcgagaaaaccggagaaaatcagtaccgcgtctggcccaatgaaatgccagcagatttgcacaaaattcgtccacatcacccactaaaccgtaatcttgatcataactggcagcaggcactgacaaaaacctccagcgaacgtcgggtggcggtagacattgaactgggcggctggcaggaacaactgattctgaccctcaccagtgaagagggtgtcagcatcacgcatacgctggacgggcagttcgacgaagccaataacgccgaaaaagcaatgaacaatctgaaggatggtctggcaaaactggggcaaaccctctattacgcccgcgatgtgcaaattaatttgccgggggcgctgtttgtaccaaacagtctgttaaaccagttccgccgtgaagctgctgacatgctggatgctgcgcgtcttgccagttaccagcgcggcagccgtaaaccggttgctgatcctgcgccggtttatccgcaaacgcatctgagtttcctcgcgaacgtatacaaccagaaagcgcgtgaattttatcatcgctatggtgtgcagctgattgacgcggcgtatgaagcacatgaagagaagggcgaagtcccggtgatgatcaccaagcattgtctgcgctttgcctttaatctgtgcccgaaacaggcgaaaggcaatatcaaaagctggaaggcgacgccaatgcaactggttaacggcgatgaagtattaacgctaaagtttgattgccgcccatgcgagatgcacgtcattggcaaaatcaaaaatcacatactgaaaatgccgttaccgggaagcgtagtggcatccgtaagtccggatgagctgctgaaaacattgccgaagcgaaaagggtaaaacgccagttttctggttactcacaacttattgaatctgcatgatattgcctgccgggtaaggcgttacgccgcatccggcatcaaatgactcaacgttgtcccgcttctggtttgcggcttttttgccagtaaaaatgctcgcgcaaaccttccgcgctctcttccgccacagcacgcaattcatcgctgtccgcttcatgacgcagctgatgatccacattctttacccacacaaattcatgtcctttgtgccctgccatgagttgtccactaaacagagcacacgttaataagacaacgcttaacgccttcgtaaacatcctgccacctttttcttaccttttgccgctatgatgccgatcgtttcttgaggttattattcagttttgcaaattagcgcaaagaaattctggaatcttccttcctgattttgcattgcattctgccgttgcggcgatttagtgctattttcgagcaaattacacacggaggtaaacactaatgtttactttgttgatatactcagcggcagggaggcgatgtgaaacaaagcgagttcagacgttggctcgaatctcagggcgtcgatgtagcgaatggcagcaaccatttgaaactcaggtttcatgggaggcgcagtgtcatgccgcgtcacccctgcgatgagattaaagaaccattgcgtaaagcaatcctgaaacaactcggtttgagttaatcgccaattaaaaaggttaatgacatgcgagagacagtcgaaattatgcgttatcccgtcactcttacacccgcgccggaaggcggttatatggtttcttttgtggatatccctgaagcgttgacccagggcgaaactgtcgctgaagcgatggaagcggcaaaagatgctttactgaccgcatttgatttttattttgaagataacgagcttatccctttacctagcccattaaatagtcacgatcactttattgaagtacctttgagcgtcgcctctaaggtattgctgttaaatgcttttttacagagtgaaatcactcagcaagagttagccaggcgaattggcaaacctaaacaggagattactcgcctatttaacttgcatcatgcgacaaaaatcgacgccgtccagctcgcggcaaaggcgcttggcaaagagttaagcctggtgatggtttaattacagttaacgaaaagttgtcatttttaacaactgatatagactgccgaatcatctgcacataattacgattcgataatgaaaaaataccagcagcttgcagaacaattacgcgagcagattgcgagcggtatctggcaacccggcgatcgtttgcctagcttgcgtgaccaggtggcgcttagtggcatgagctttatgactgtcagccatgcctatcagttgctcgaaagtcagggatatattatcgcacgaccgcagagcggttattacgttgcgccacaggcaataaaaatgccgaaagcgccagtcattccagtcactcgagatgaagcagtcgatatcaacacttatatttttgatatgttgcaggccagtcgcgatccgagcgtcgttccgtttgccagcgcctttcccgacccgcgacttttccccctccaacaactaaaccgcagcctggcgcaggtaagcaaaaccgccacagcgatgagcgtgattgaaaacttaccgccaggaaacgcagaactgcgtcaggctattgctcgtcgctatgccttacagggcatcaccatttctcctgatgaaattgtcattactgccggggcgttagaggcattaaacctcagtttgcaagcggtaactgaaccgggcgattgggtgatagtagagaatccttgtttctacggtgcgttgcaggcgctggagcggctacggctgaaggcgttaagcgtggcgacggatgttaaagaagggatagatcttcaggcgctggaactggcgttgcaggagtatccggtgaaagcgtgctggctgatgactaatagccagaatccactcggatttaccttaacgccgcaaaaaaaagcacaactggtggcgttgctcaatcagtacaacgtaacgctgattgaagatgacgtttacagcgaactttattttggacgggaaaaaccgctgcctgcgaaagcgtgggatcgccacgatggcgttttgcattgctctagctttagcaaatgtctggtgcctggttttcgtattggttgggtcgccgccggaaaacatgcacgtaaaattcaacgcttgcagttgatgagtacgctttccaccagcagtccgatgcaacttgcgctggtggattacctttccacgcgccgatacgacgcccatcttcgtcgcctgcgtcgccagcttgcggaacgtaaacaacgtgcctggcaggcactgctgcgttatctgcctgcggaagtgaaaattcatcataatgacagtggttactttctctggttggagctccccgagccgttagatgccggcgaattaagcctggcggcactgacgcatcatatcagtattgcgccgggtaaaatgttttctaccggtgaaaactggagtcgttttttccgttttaataccgcgtggcagtggggagagcgtgaagaacaggcggtaaaacaattaggcaaacttattcaagaacggctgtaatagcgtttaatttaattcctcttagattgggtaatatgaatttcgaatagcagtcatatttcctaactccttgactatactccagaagataaccttacagacggcataatgcgcggtagctcacaacctgaataaattttctcaggggcgaaggtgtgcctgcaagccgccgtctatggttaaacaaggagatatttttacggcacggcggctgaacaattaattacgacaggagtaagaccttatgagcaagacatttgcccgcagcagcctgtgtgcgctcagcatgacaataatgaccgctcacgccgccgaaccgcctaccaatttagataaaccggaagggcgactggatattatcgcctggccgggatacatcgaacgcggacaaactgataaacaatacgactgggtaacgcagttcgaaaaagagacaggctgcgcggtgaatgtgaaaaccgccgcgacttccgatgaaatggtcagtctgatgaccaaagggggttacgatctggttacggcatccggcgatgccagcctgcgtttgattatgggtaaacgcgtgcagccgattaataccgcattgattcccaactggaaaacgctcgatccgcgcgtggttaaaggcgactggtttaatgttggcggcaaagtttacggcacaccttaccaatgggggccgaacctgctgatgtacaacactaaaaccttcccgacgccgccggatagctggcaagtggtttttgttgagcaaaatctgccggacggcaagagcaataaaggccgcgttcaggcttatgatggccctatctatattgcggacgctgcgttgttcgttaaagccactcagccgcagttgggcatcagcgatccgtatcaactcaccgaagaacagtaccaggcggtgctgaaagtgctgcgcgctcaacacagtttgatccatcgctactggcatgacactaccgtgcaaatgagcgatttcaaaaacgagggtgtggttgcttccagtgcctggccctatcaggccaacgccctgaaagccgaaggccagcctgttgctaccgttttcccgaaggagggtgttaccggttgggctgataccaccatgctgcatagcgaagcgaaacatccggtttgcgcctacaaatggatgaactggagtttaacgccaaaagtgcagggcgatgtggcggcctggtttggcagcttaccggtagtgccggaagggtgtaaagccagtccgttattaggcgaaaaaggttgtgaaaccaacggttttaactatttcgacaaaatcgccttctggaaaacgcctatagcagaagggggcaagtttgttccctacagtcgctggacgcaggattacattgccattatgggcggtcgctaacttcgctggggtgctttatgacgtacgcagtggagtttgacaacgtcagccggttgtacggtgacgtgcgcgcagtagatggcgtcagtattgcgataaaagatggtgagttcttctctatgctggggccgtccggctccggcaaaaccacctgcctgcgcctgattgctggcttcgaacagctttccggcggggctatctctatctttggtaaacccgccagcaatctgccaccgtgggagcgggacgtgaatactgtctttcaggactacgcgctatttccgcatatgagcattcttgacaatgtcgcctatgggctgatggtcaaaggcgtgaataaaaagcagcggcacgcaatggcgcaagaggcgctggagaaagtggcgttggggtttgtacatcaacgtaaaccgagtcaactttctggtggtcagcgccagcgggttgctatcgccagagcattggtgaatgaaccgcgcgtattgctgttggatgaaccgctcggcgcactggatctcaaattgcgtgagcagatgcagctggaactgaaaaaactgcaacagtctctcggtatcacttttatcttcgttacccacgatcagggcgaagcgttaagcatgtccgatcgtgtggcggttttcaataatggacgcattgagcaggtcgattccccgcgcgatctctatatgcgcccgcgcacgccgtttgttgccgggttcgttggtacaagcaatgtttttgatggactgatggcagagaaactttgtggcatgacgggaagcttcgccctgcgaccggaacatatccgcctcaacacccctggtgaactgcaggccaatggcacgatccaggcggtgcaatatcagggcgcggcaactcgttttgaactgaaattgaacggcggtgaaaaactgcttgtgagtcaggccaatatgacaggcgaagaactgcctgccacgctcacgcccggacaacaggtgatggtttcctggagccgtgatgtgatggtgccgctggttgaggagaggtgaatggcgatgaatgtattgcaaagtcctagtcgtccaggtctgggtaaggtgtccggtttcttctggcataatccggggctggggctgtttttactgctgcttggcccgctaatgtggtttggcattgtctatttcggcagcctgctgacactgttatggcagggattttatacttttgacgatttcaccatgagcgtaacgccggaactgacgctggcgaatatccgtgcgctgtttaatccggcgaattacgacatcattctccgcacgctgactatggctgtggcagtcactatcgccagcgccattctggcttttccaatggcgtggtatatggcgcgctataccagcgggaaaatgaaagcgtttttttatattgcggtaatgttgccgatgtgggcgagctacattgttaaagcctatgcctggacgttattgctggcaaaagatggcgtggctcagtggtttttacaacatcttgggctggaaccactgctgactgcgttccttacattacctgcggtgggcggaaatacgctgagtacttccgggctggggcgctttctggtgtttctctatatctggttgccgttcatgatcctgcccgttcaggcggcgcttgagcgtttgccgccgagtttgttgcaggcgagcgctgatctcggcgcacgtccacgacaaacctttcgctatgtggtgctgccgctggcaatcccgggtattgccgctggctctatctttaccttcagtctcacactgggcgattttatcgtcccgcagctggttggtcctccaggatattttatcggcaatatggtttattcccagcagggggcgattggcaatatgccgatggcggcggcattcaccctggtgccgattattctcatcgcactgtacctggcgttcgtgaaacgtctgggagcgttcgatgcactctgaacgcgcaccgtttttcctcaaactggcggcctggggcggcgttgttttcctacattttcccatcctgataatcgccgcctatgcgtttaacactgaagatgcggcgtttagttttccaccgcagggcctgacgctgcgctggtttagcgtggcagcacagcgtagtgatattcttgatgccgtgacactgagtcttaaagtggcggcgctggcgacattaattgcgctggtgttagggacgctggcagctgccgcgctgtggcgacgagactttttcggcaaaaacgccattagcctgttactgctgctgcccattgcgctgccgggcattgtcactggtctggcgttattaaccgcctttaaaaccatcaatctggagccgggatttttcaccatcgtggtcggtcatgcgactttttgtgtagttgtggtgtttaacaatgtcatcgcccgttttcgccgcacctcctggagtctggttgaggcgagtatggatcttggggccaatggctggcaaaccttccgctacgtagtgttgccgaatctcagtagcgcgttactggcaggaggaatgctggcgtttgccttgagcttcgatgaaatcatcgttacgacctttacggcaggtcatgaacgaacgttaccgttgtggttgctcaatcagcttgggcgaccgcgtgatgtaccggtaactaacgtggtggcactgctggttatgttggtaacaaccttgccgatcctgggggcctggtggctaacccgcgaaggcgacaatggtcaataaccactgatacaggaatatgctatgcaacataagttactgattaacggagaactggttagcggcgaaggggaaaaacagcctgtctataatccggcaacgggggacgttttactggaaattgccgaggcatccgcagagcaggtcgatgctgctgtgcgcgcggcagatgcagcatttgccgaatgggggcaaaccacgccgaaagtgcgtgcggaatgtctgctgaaactggctgatgttatcgaagaaaatggtcaggtttttgccgaactggagtcccgtaattgtggcaaaccgctgcatagtgcgttcaatgatgaaatcccggcgattgtcgatgtttttcgctttttcgcgggtgcggcgcgctgtctgaatggtctggcggcaggtgaatatcttgaaggtcatactagcatgatccgtcgcgatccgttgggggtcgtggcttctatcgcaccgtggaattatccgctgatgatggccgcgtggaaacttgctccggcgctggcggcagggaactgcgtagtgcttaaaccaagtgaaattaccccgctgaccgcgttgaagttggcagagctggcgaaagatatcttcccggcaggcgtgattaacatactgtttggcagaggcaaaacggtgggtgatccgctgaccggtcatcccaaagtgcggatggtgagcctgacgggctctatcgccaccggcgagcacatcatcagccataccgcgagctccattaagcgtactcatatggaacttggtggcaaagcgccagtgattgtttttgatgatgcggatattgaagcagtggtcgaaggtgtacgtacatttggctattacaatgctggacaggattgtactgcggcttgtcggatctacgcgcaaaaaggcatttacgatacgctggtggaaaaactgggtgctgcggtggcaacgttaaaatctggtgcgccagatgacgagtctacggagcttggacctttaagcagcctggcgcatctcgaacgcgtcggcaaggcagtagaagaggcgaaagcgacagggcacatcaaagtgatcactggcggtgaaaagcgcaagggtaatggctattactatgcgccgacgctgctggctggcgcattacaggacgatgccatcgtgcaaaaagaggtatttggtccagtagtgagtgttacgcccttcgacaacgaagaacaggtggtgaactgggcgaatgacagccagtacggacttgcatctagcgtatggacgaaagatgtgggcagggcgcatcgcgtcagcgcacggctgcaatatggttgtacctgggtcaatacccatttcatgctggtaagtgaaatgccgcacggtgggcagaaactttctggttacggcaaggatatgagtctttatgggctggaggattacaccgtcgtccgccacgtcatggttaaacattaaggataatattgcagatcgtaagagtatgagatgatcttgcgtactgtcagagcactgatttctctgacagtacgtgctgcgtgcaaaatcactacatcaaataaaccagccaaatctcatagagataagagtaaacaaaccaacagcagcaaagaaatttatcagtactacagttctactggaaacattcatttttgccaccttttatcattgcccctatgtgtatagtacgggttaagaaaatccgcaataatactcattctgaagatggataagggcaagttgctgtttgatgattttttctcaaactggtgaaaaaacttgatgcacgtcaaaaaatgacgcatatttgcgcgcgttttattcatctggctggacgcccgtacatgtctctctatcaacacatgcttgttttttatgcggttatggcagcaatcgcatttcttatcacctggtttctttctcacgataagaaacgcatccgtttcttaagcgcctttctggtgggggcaacatggccgatgagtttcccggtggcgctgttgtttagtctgttttaaatcttactcactggcttgacggcaccacgcagacttatatcatttggatgaatcgataaatttcacaagtggctaaggagaaagtatgagccatctggatgaagtcatcgcgcgcgtggatgccgcgattgaagagagcgtcattgcccatatgaacgaattattaatcgccctgagcgatgacgcggagttaagtcgggaagatcgctacacccagcagcaacgtctgcgcacagcgatcgcccatcacggtcgcaagcataaagaagatatggaagcgcgccacgaacagttaaccaaaggcggcaccatcctctgattaaaaactgcgtctggctaccaaccaggcgccaaccacaagtaaaattgcgccacaaattgggccgaacaacgcccgtagtggtacgccatgactgcggaagatatccagcatcagaccgccaatcagctgactggcgaccagtacagcaatagttgtcgccgctcccacattctgatatccgctgatactggcgaagacaaaaaagcttcccagcaagccaggtataagtgtccaccagcgcacgctggacaccagttcgccaaaccccgccatgccttgtttaaaccataaaatagaaacaaagagcacaatccccaccagactgttcagcaacatggcgatgagaatggtagaggaggtctgggtgatgcgcaccatcagcgtgttctggacaaccagaccaattccggcggcaatcaaaaaagcaagggtgaggctctgattcatccaatcgcgtccggttcagtgcgctcgtcgagttgcaactgcataaatgtcagatccagccaacgaccaaatttagtgcctacctgcggcatttgcgcggtgacgacaaatcccaggctctggtggagatgcaggctggcctgattttggctttcgatcccggcgaccatgacatgcttcccgcaatcccgcgcttcatcaatcaatcggcttaacaatttacgccccagacctttgccctgatgatcgggatggacataaacgctatgttccacggtatggcgaaaaccatcgaaactacgccagtcgccaaagctggcatatcccgtcactacgccgttttcctcgctcaccagcactggataacctgctaaagtccgcgcttcaaaccaggcaatgcggttatcagcatccaccgtttggtcattccagatagccgccgtatacaacacggcgtggttataaatttccgcaatggcagcacagtcggctttgcgggcaaaacggatggacatgtctggcctcaataaaataatgatgatgatgttatcaatactatcgaaaacagcccgaagcaacggattcctcgatgaaattattgcgtgttgcagaggggatgtgacggctgcaaacaaaaccaatcccgtgagcctgctactattgatggattcatgccaaaagcacaggagagcattatggggcaacaaaagcagcgtaatcgacgttgggttctggccagccgtccacatggcgcacctgttccggagaatttccgtcttgaagaagatgatgtcgccacaccgggtgaaggacaggtgttactgcgcacagtttatttgtccctggacccgtatatgcgtggacgtatgagcgatgagccatcttatagtccgcctgttgatattggcggcgtgatggtcggcggtacggtgagccgtgtcgtggagagcaatcatcctgattatcagtctggcgactgggtgctgggctacagtggatggcaagactatgacatatccagtggtgatgatctggtgaaacttggcgatcatccgcaaaatccaagctggagcctgggtgtgctagggatgccaggctttaccgcttatatgggcctactggatatcggtcagcctaaagagggcgaaacgttggtggtagctgcggcgacaggaccagtgggggcgacggtggggcaaatcggcaaacttaaaggttgcagagtggtgggggtagccggtggcgcggaaaaatgccgccatgctaccgaggtgttaggcttcgatgtttgtcttgatcaccacgcggatgattttgccgaacaactggcgaaagcgtgcccaaaaggtattgatatctattatgaaaacgtgggcggtaaggtattcgatgcggtgctaccgttacttaatacatctgcgcgcattcccgtctgcggattagtgagcagctataacgctacagagctaccacccggtccggatcgtttacctctgttgatggctacagtgctgaaaaaacgtattcgcttgcaaggttttattatcgctcaggattatggtcaccgcatccatgagtttcagagggagatggggcaatgggtgaaagaggataaaatccactaccgcgaagaaattactgacggtttagagaatgcgccacagacgtttatcggcctgctgaagggtaaaaacttcggcaaagtggtgatccgcgtggcgggtgatgattaaagtttcaacggcggcgtaagccgccataaaaatccaggcaaaaagcttattttcagctttaattaactaaccacatcattgttctgctgctaataacaacaaaggtgagtggtttatgattattcactttaatacaccaggtgaattccttctgccatgcaggcagggttggacagaaaacacgcgaaggaattaaaatgcctggaacgggaaaaatgaaacatgtcagtttgactctgcaggttgagaacgacctgaaacatcagcttagtattggcgcattaaaacctggcgcacgcctgattactaaaaatctggcggagcaattaggtatgagtattacacctgtgcgtgaagcattattacgtctggttagcgtgaatgcgctttctgtcgcacctgcacaagcatttacagttccggaagtggggaaacgtcaattagacgaaatcaatcggatccgctacgaactggaattaatggcagttgctctggctgttgaaaacctcaccccgcaagaccttgcggaactccaggaattgctcgagaaattacagcaggcgcaagaaaagggcgacatggaacaaatcattaatgtaaacaggctatttcgcttagcgatttatcatcgcagtaatatgcccatcctgtgtgagatgattgagcaactgtgggtcaggatggggcctggtttacattatctctatgaagcgattaatccagcggaattacgggagcatatagaaaactatcatctgttactcgctgcgttaaaagcaaaagacaaagagggatgcagacattgtcttgctgaaattatgcaacaaaatattgctattttataccagcaatacaatcgttaaagtaaatgcccggcaaataccgggcatcaaggtaattactcaaatctccacgcaatattcatgccgacaccataatttcgtccggggctaggttcgtaatatcgcccgttactctcattgacaatgacagaaccaacgtattctttatcgaataaattatcgacacgaccaaataaatccacagttaaattgtggtaattgtatttatacccggtgaataagccgacgagagtataagacggcgcttttgccgtattttcatcatctgccataatatcgcccatataacgcgcttccgtgcctgcataccaaccatcttccggtacataacctatgctcgcaaagcccatattacgggcgatccctggcatccgattaccgttacaatcctgttcattgcaaacattgctgcgataggtcgcatcaagccaggtccaggacgcgtttacgcgaaaatctcctgcgaaacgttgatcccatgccagttcagcgccttgacgacgggtctttccggcatttttgtaagtcgtacgcccaccgctactgctatcgacaacaatttcatcatcagtgtcggtctgaaacaatgcgagactaagcagcccatcaccaatacgcgttttactgccgatctcaattgtatcgttggtggatggttttaaacctaagttcataccgctttgcccatcagcacgataagacagctcattaatcgtcggcgtttcaaaacctcgcccggctgccagatagatattccaggcatcggtcattgcatattttaagctaccggcaggtagccatttatgataactggcatcaccgctgtcatcgccgttacccggagtaacgtaatggtcgttggaatcaaaccacacggagctgtagcgcacgccagcatccaggctcagtttttcgctcagctgccactgcgtctgtaaatagggatcgatgttccacatcagattgcgttcgtcgcgacgcaactcacctttttgcccgtactccggcatgccgctattcaggcggaagttattgtagcccttgcggttttcactcatgttttcgtagttcaggccggtagtgaacgtgaccggaacgcccagttcaccacggtgtgtccagcggctgtctattccctggtaatggcgttgcagggtaatcacgccgcccgcatgactcgggttaagttgtggtgccatgggtatactctggtactgggtcgtttctcgctctccggcatacatcatcacactcatatcatcccggctactcaggctacgctcatagcgcaacccagcctgagtttgcttgatggtttttcgcgtgtcgtactgttctgcacgaggcgcttgttgtggattagccttccattctgctttggttagcccacctgggtcatctgctttgatatccacactattgaaaatcagacttaatttgctggcttcatcaatgcgtacgcccagtttggcattggctaaatttttctgtgcgccactatggtcacgatagccgtgggtcgtaaaacgcgtggtactgacggtgtaatcgacatcgccaggctgtgtgccgtctcccgttgcgcccgttgctttcagcccatagcgccagctgccaaaactgccgtagtaactactggcttcaatggttggtggctgttgtccggtctgggtggtgacattcattaccccaccagacgcgttgccatacagggcagagaaggggccacgcagcacttccacattttgcacactgcttaaatcgatgttggatgtttgcccttgcccgtcgggcatggtggcgggaataccgtccacatacaggcgaataccgcgaataccgtaagtggagcgggagccaaatccgcgaatgctcagctgtaaatcttgcgcatagttctgccggttttgtacctgcaaaccaggcacgccggtcagactttcggacaagttaatgcgcggtgttgccaggcgcatctcctcgccatccaccacgcttactgctgctggggtatccagttcactaaccacctgcggtgcggcactgacaatcatagtctgttcatcagcggcaaaaacaacgggggaaaggacaagcagtgcgggcaaaacggtctgtcggacggaaaaaatcttcatgaaaaaagccaggttaagaatgggaaaacgccgtcatggtaatgaaattgtaaatttatggaaaatgaaacggcacaatacgttaagtaattgagaaaattgtagtcgtaacggcaagaaatgctccacatttgagaaaataatgattaccattcccatttataacaagagcgtaacgatgattacgcttagcgaagcattgtgaagcagcaaaaatatcggttcatcaaagggagtcgtcatgcatttacgtcatctgtttagtagccgcctgcgtggtagtttactgttaggtagtttgcttgttgttagtagtttcagtacgcaggccgcagaagaaatgctgcgtaaagcggtaggtaaaggtgcctacgaaatggcttatagccagcaagaaaacgcgctgtggctcgccactagccaaagccgcaaactggataaaggtggcgtggtttatcgtcttgatccggtcactctggaagtgacgcaggcgatccataacgatctcaagccgtttggtgccaccatcaataacacgactcagacgttgtggtttggtaacaccgtaaacagcgcggtcacggcgatagatgccaaaacgggcgaagtgaaaggccgtctggtgctggatgatcgtaagcgcacggaagaggtgcgcccgctgcaaccgcgtgagctggtagctgacgatgccacgaacaccgtttacatcagtggtattggtaaagagagcgtgatttgggtcgttgatggcgggaatatcaaactgaaaaccgccatccagaacaccggtaaaatgagtaccggtctggcgctggatagcgaaggcaaacgtctttacaccactaacgctgacggcgaattgattaccatcgacaccgccgacaataaaatcctcagccgtaaaaagctgctggatgacggcaaagagcacttctttatcaacattagccttgataccgccaggcagcgtgcatttatcaccgattctaaagccgcagaagtgttagtggtcgatacccgtaatggcaatattctggcgaaggttgcggcaccggaaagtctggctgtgctgtttaaccccgcgcgtaatgaagcctacgtaacgcatcgtcaggcaggtaaagtcagtgtgattgacgcgaaaagctataaagtggtgaaaacgttcgatacgccgactcatccaaacagcctggcgctgtctgccgatggcaaaacgctgtatgtcagtgtgaaacaaaaatccactaaacagcaggaagctacccagccagacgatgtgattcgtattgcgctgtaatagatatggcgagggtgaaaacggtgagacttgcctgccttttatcacggcgtatccggcactttcgtcagtaatctgaatttgcccggcacgtagccgggcaattttgcaattaactcgccgtttcaggcttaaacacaatttcctgtttttcttcatcttcctcgacgactggcgcagtgctgtgaatttcagcaacgcgtttgcgcacaccaaaccagcctataaccagcaaaataccgataatcggcagcgccgcgatagtataagtcccgttcgggtaatcgaacgccatcagcacaaggacactcagtaaaaacagtaatgtcagccaggaagtgaagggcgcgccaggcagtttaaaactgacatccgctgctttgccttctttaatcgctttacgcaggcgcatctggcacacgatgataaacgcccaactagcgatgattcccaggctcgcgaagttcaacacaatctcaaatacgcggctcggcaccagatagttgaggaatacgccgacgacatacacaactagtgtcgccagaatcccggcatacggcacatgctgacgactcattttcgccataaaactcggtgcggaaccgcccatcgccatactgcgcagaatacgtccggtgcagtacagaccactattcaggctggagagggcagcggtcagcaccacaatgttcataatgctgccgatatatggcacacccagtttagagaaaaacgtcacgaacggactttgccccgcctgatacgcgctccacggcaataacataaccagcaacaccacggagccgacgtaaaacaggccaatacgccaaatcacactgttaatggctttaggcaccatggtctgcggatctttacattctccggcagctgtacccaccatttcaatggaggcaaaagcaaacactacgccctgaatcaacaccagcgcaggcagcaaaccgtgggggaagaagccgccattatcggtgattaaatgaaagccagtggtgttgccatccagcggctgaccactaccgaggaacactgtacccacgaccaaaaaggtcacaatggcgagcactttaataagcgcaaaccagaactccatctccgcaaaccatttcacaccgatcatattcatggtgccaacgatggtaagtgcagcgagcgcaaagacccactgcggcacgccgccaaacgcaccccagtaatgcatatacagagcgacggcggtaatatcaacaatccccgtcatcgcccagttgatgaagtacatccagccagcaacataagcggctttctcacccaaaaactcacgggcataagaaacaaaactgccactggaagggcggtgtagcaccagctcacccaatgcacgcagaataaaaaagctaaacaagccacaaattaaataaaccagtgccagtgcgggccccgccatttgcagtcgggctcctgcacctaaaaacaagccggtgccaatcgcgccgccaatggcgatcatctgcacctggcgattgcccatcgctttgtgatacccctcttcgtgggcattaagccagcggcgtttcgcggcgtgttgatcactagtgtcggtgtcgtgtttactcattgctctccctgattgctttaatgaaaaagtcatataagttgccatgaacaatgtttattcatcctggcgatgatagttatcaccattattctttatgggtataaaactatcggcgcagcatcctacccgttatcgataaacgatgcaaaacatccccttacaatcctgaaggggattaatacaactgacgaaaaaatgacaaatccttttgctggttaacctgtgtactgtcctacacttaatctttaaaagattgtgaggggcatatgattaaggtgtatggcgtacccggatggggctctacaatcagtgagctgatgctaacactggctgatattccttatcagttcgttgatgtcagtggttttgaccacgagggagctagtcgcgagttattgaaaaccctgaacccgttgtgtcaggttccgacactggcattggaaaatgacgagattatgacggagacagcggcgattgcattgatggttctcgatcgtcgcccggaccttgcgccaccggttgggcgcgccgaacgtcagctgtttcaacggctattggtctggctggttgctaatgtctatccaacattcactttcgccgattaccctgagcgttgggctcctgacgcacctgaacagttaaagaagaatgttattgaatatcgaaaaagcctttatatctggttgaatagccagctcactgctgaaccttatgcgtttggtgagcaactaacgctggtggactgttatctttgcactatgcgcacatgggggcctgggcatgaatggtttcaggataatgccacgaatatcagtgcgattgctgatgctgtatgtcagttaccgaaattacaagaagtattaaaaaggaatgaaattatttgagtgggataccagaagattatgttatttattattcagtaactttatccacaatgatgggcgtaattaattaaattcatggtatgttttttaatttatatcactctccttttcattcagcgtgtctatttcatttcctctgaaaagaaactaactattcacatcgtgcagatgtttcagttgttaagtcaggcattctataatctcaaaatgtttttaatgatggatatgctcggagttggagatgcaattaatattaatacaaataaaaatatccggcaggtatgctaaaaggataaatggcgttctctgtatttattcgcaattatctgtaggacaaatatggagagcttgatgagtcagagctaaaacagcaattgattaataaacatgttgatttattcaagaaaatggatgtattttaaatgttgattcttaatataacctaatcaatagattatcaagtgagagctacacattattggaggggcaggggaaaacaccattttgggaacaatgcatcaggtactcttaccactgaagcaagatcatccggcaccaggtggtggtgcagtgctttggaaatggtcccctcgggggagttgtcattattttctatgctatttgcttattatattcatcaggtgaatttaataaattcctaatttgaaatatccactattaagctagtgtttaacgacgttaagatggcaatgtgcagatcatgttatcagggtggggcggtagcgtatattccttatacaaaccatcattcatttcaatgattgttattgaattatttattgttgtgaataaaaagacattatgaatattggtttgactttgcatatcaggttttttattactcgctgtaatgtacgagcctgtcgtgaataacgtcgagaacccatccgttgcgtttgtgattattttgttgactaaacagacacccgtttctctgaagtaaaatcccagactaaatcatcacataaccatgacatttttctgatattccccggtaacgccagataacgatgccaaatttaccgttatgttcaatcaactccctggtccatgtcgatttatctaccacaatcgccacgcgtggaggttcaaactccaccggcattgaccaggctgcagccataatgttacgccgctgggattgctcatcgaaactggtgatcaagaccgttgggccatgatttaacagacggctggcatggtgtaattctatggggatgaatcggctcatggtatcgcctcgcgaagaaggtttttttaagcgtagtccgtaacgcaataagtaacgaaattaacgggattggcgatttgcgaacgtgatgcatgtccgcgatcgcacaaaatagccggtgcggcgtctattccaggttataagttgagaaaaccactaagggaaacgcctgatgacgcccattctgaatcactattttgcccgtattaactggagcggagctgctgcggtcaatattgatacgcttcgtgcattgcacctgaaacacaattgcaccattccgtttgaaaacctcgacgttttgctgccgagggaaatacagcttgataatcaaagcccggaagagaaactggtgatagcccgtcgtggcggttactgttttgagcagaatggcgtgtttgagcgggtgttacgcgagctggggtttaacgttcgcagcttgttagggcgcgtagtgttaagtaatccgccagcattaccgccgcgcacccatcgtttgctgttggtggaactggaagaggaaaaatggattgctgatgtcggtttcggtgggcagacgctaaccgcgccgattcgtttagtttccgatctcgtgcagaccacgccacacggagagtatcggttgttgcaggagggtgatgattgggtgttgcagtttaatcatcatcagcattggcagagcatgtaccgttttgatctctgcgagcagcaacaaagcgattatgtgatgggcaatttctggagcgcgcactggccgcagagccattttcgccatcatttgctgatgtgccgccatttgccggacggcggcaagctgacactgaccaattttcattttacccattatgaaaatgggcacgcggtggagcagcgaaatctaccggatgtggcgagtttatatgctgtgatgcaagaacagtttggtctgggcgtggatgatgcgaaacatggctttaccgtggatgagttagcgctggtgatggcggcgtttgatacgcacccggaggcgggaaaataatttatgtcaggttgccggatgcggcgtaaacgccttatccggcatacattagcccggttgtagacctgacaggcgaagcgcatcagacaacggtttcagagttcaattgcccattcggcatgaaacaaaatcaccgctgtgccactaatggtgactttttccggttggttatcacgaattgtcaccgtcacttcaatcataccgtcacgccccaatgcgcgcccctgatggcctttaacacgcaacacgttgccatcgtggggcaatacgttgtgatgtaccaaccatgcacccatcgggccattggcattgccagtcaccggatcttccacaataccaatcgcagggctgaacatgcgaccatcggtttcgtttttgcctgggcggatctggaacgggaagaaaccattgcagccaatctttttgctgatagcggtcagcgcattaaggtcagggctaagggcgtcgatatccacttccggtttcagtgggatcatcactttactgtgtcctgttgttgccacctgaattggcaagcctggcagaatatcgtcctcagtgagatgaagcgcgttgataatcgccgcacgtgtttcaccttccagcggtggctcaaagcccggcgtaccttgttccaggctaatacgataatcatcgttgtgcttttcgatagtcacgcgatgttttcctgccaggcttgtttgccagatcgtgcaatttcctaaacctaacaccttcgcacgtacatagtgcgcagctactgtcgcgtgaccgcaaatcggcacttcaaccgttggcgtaaagtagcggatgcgcacatcgctgtcgtcgctgtgcagcagaaaagcagtttcgctatggcctaactcgcgggcgataagctgcatttgcgcttcgctaagattatcggcggggaaaacaacaccggcagaattgccgcgaaacggttgactggtaaaagcatcgacgtggtacacctgcggtttcattaacgttctcctgtgactggagaactatcatagcctgcaagtggccggagagcgaagggctatccggccagggtgaaattatcgccggctacgcacaatttgatatcgacgagtaaagtactcaaacggcgcgctccacacatgcaccagtcgggtgaacgggaagagcaggaagatggtcattcccaacaccagatgcaggcggaagacgaacgctacgccgttgagcatctcactgcttccaccacggaaagtgacaatgctttgcgcccaacccaccagcttcatcatttcgctaccatcaggatactgtgcactaaacggtatggtacttagccccaacagacactggatcagcaaaatgctcatgatgatgatatccggcgtagtggaagtggcacgcacgcgctgatttgtcagcctgcgccacagcagtcctgcgccgccaatcaacgtcaacacaccgcaaataccgccgagcaccatcgccatgagttgtttcgctgccactggcaaaaaccacgcgtacatccagtgcggcgttaacatgccgaacaagtgcccgaagaaaatccccaaaatgccgatatggaacagattgctccatatcaccatcccgcgtttatcgagcatttgactactggaggcgcgccaggtgtactgcccgtagtcgtagcgcagccagctgccgaggaaaaacaccgtcgcacaaatgtacgggtagatatcgtaaaaaaagacgttcagatactgaatcatttcccacctcccgcactgatgtcgacatattgcggcgcgacatcctggctaaagcgtcgctgatattgattaagcgggctgctgtcacacgccgtggcgttatcttcaataaacttcacctgttcctcttcccacactgcatcaagcgcctggcgggtgtcatcgcgctcttcgctgtttacttgttttgtgacactgtcactactaagggagcttcccgccagttgcagcagagcatcaaacaacgcgtaccacggtgcctcgcgttgttttaagcgaccgccaagcagggcgaggatcggcgcaacattgagcaatccttctttcgcctgatcgtcaggcagtacgcttaaatactccagatacagcggtagataatcgggcagttcccgacaatccagctgcaggccgaccttttcatactccgccagcaggtccaccattgcctggccgcgatcgcgggactcggcatgaacatgttcgaacagcagcaggctcgtggtgcgcccgcggtcaaacacttcgcaccattcggcctgtttatccagcagcggcgcgttaagcaggttgtgggtgaaatccgtaagcatcggcgcgtcgcggcggatcaacgccagcgcgtcctccttgcattcccacaacagctcgtccggatactccatcaacaggccgatcactttgaggatctgcattattcgccctccgctttgtcgcgcacttcggtgatgttgatggcatcgatacggctactgttgaacaggttgaatttactgtcgctaccgtggcaaccgtcgccaaaggtaaaaccgcagccgttgcgttctgcgaaggcatcgcccgccatttcccgatggctggtcgggataacaaaacgatcttcatagttggcaatggcgagatagcgatacatctcttcgacctgggcgacgctcaggcctacttcgtcgatggcacgagtatcagtaacgccttccacggtttgactacgcatatagtggcgcatcgccatcatccgtttcagcgcccgcagtaccggaccggtatcgccggcactcaacatattggcgagatattgcaccggaatacgcaggctttcgatggcgggcagcacgccttcgcttttcggcaaaccgcccgcatctgcgtaggactgaatcggactcagcggaggaacgtaccagaccatcggcagggtgcggtattcagggtgcaacggtagtgccagtttccagtccatcgccattttgtagactgggctacgctgggcagcgtcaatcacattttgtggaataccttgtttcagggcttcctcgatcacactgggatcgtgtggatcgaggaacacttcgcactggcgttcatagaggtcaacttcgcgctcggtgctcgccgcttcctcgatgcggtcggcgtcgtaaagcagcacgcccagataccggatgcgacccacgcaggtttcactgcacacggtcggttgaccggactcaattcgtgggtaacagaagatgcatttttcactcttgccgcttttccagttgaagtagatttttttgtacggacaaccgcttatgcacaaacgccagccacggcatttatcctgatcaatcagcacaatgccgtcttcttcgcgtttgtagatagcgccgcttgggcaggtcgccacgcagctgggattgaggcagtgttcgcacaggcgcggcaggtacatcatgaaggtgttttcaaactgcccgtacatctccttttgcatggcctcgaagttgcggtcgcgggcacgtttttcgaactcaccgcccagcagttcttcccagtttggcccccagatcactttgtccatccgtttgccgtcaatcagactacgcgggcgagcagtaggaatatgtttgccttccggtgcgctatgcaaatgttcgtagtcgaaggtgaaaggttcgtagtaatcatcaatctgcggcaccaccgggttggcgaagattttggttattacgcccatcttgttgcccagacgcgggcgtatcttgccattcacatcacgcacccagccgccttgccactcttcctgatcttcccagtttttcggataaccaatgcccggtttggtttcgacgttgttaaaccatgcgtactccatgccttcgcgcccggtccagacgtttttacaggtcacgctacaggtatggcagccgatacatttgtcgaggttaagcaccatgccgacttgactacggattttcattttttcgcctcctgtacctgatcgcgaccttcatcatccagccagttaacgttcttcatcttgcggatcatgatgaactcatcgcggttgcttccgacggtgccgtagtagttaaagccccaggccagctgcgcgtaaccgccaatcatatgcgttggtttcgggcaaacgcgggtaacgctgttatgaatgccgccgcgcatgccagttacttcgctaccaggaatattcataatgcgttcctgggcgtgatacatcatggtcatgcccggcggtacacgttggctgaccaccgcgcgggcagtcagcgcgccgttggcgttgaatacttccacccagtcgttatcgacaatggtcagttctcgggcatctgtttcgctgatccagacaatcggtccaccgcgagagagcgtcagcattagcaggttttcactgtaggtactgtgaatgccccatttctggtgcggcgtcaggaagttaagtgctttttccgggaagccgtttggcggtatctggcgcatctcactgacgctacgggtgtcgataggcgggcgataagccaccaggctttcaccaaaagcacgcatccacggatgatcctgatagagctgctggcgtccgctcagcgtgcgccacggaattaactcatgaacgttggtgtatcccgcgttataggagacgtgatcgctttccagaccggaccaggtggggctggagataattttacgcggctgcgcctgaatatcgcgaaagcgaatcttctcgtcctctttgtgcagcgccagatgggtatgttcgcgcccggtgatctcgcccagcgcctgccacgctttgactgcaacatgaccgttggtttccggtgccagtgccagaatcacttcactagcgtcaatggcggtgtcaatcagcggacgcccctgtgccgggccatcacgcttggtgtaattgagtttgccgaggaaatcgatttcatcctgggtattccagctaatccctttaccgccattgccaagtttgtccatcaatggcccgaggctggtaaagcgttcatacgtagcagggtagtcgcgctccaccgccacaatattcggcgcggttttgcctggaatcagatcgcattcgcctttgcgccagtcgagcacttcacacggctgactgagctctgccggagagtcatgcagtaggggttgtaataccacgtcggtttctttgccaagatgacccacgcacacttggctaaatgctttggcgatacctttgtagatttcccagtcgctgcgactttcccacgccggatcgaccgccgcagaaagcggatgaataaacggatgcatatcgctggtgttcatatcgtctttttcgtaccaggtggcggtgggcagaacgatatcggagaacaggcaggtactggacatgcggaagtcgagcgtcaccagcaggtcgagcttgccttcaatcgctgcagtttgccactcgacttcttccggtttgatcccgtcgctggcaccgagttcctcgccctgaatcccgctttcggtccccagcagatacttctgcatatactcgtggcctttgccggaggagccaagcaggttagagcgccagacaaacaaattacgcggatgattgctgctgctatctggttgttcgcaggccatacgtaaatcgccgcttttcagcgcctgggcggtaaattctgtgggggataatccggccttgtcggcttcagctttaatcccgagcgggttacgccccagctgcggcgcagaaggtagccagcccatacgttcggcgcgaacgttgaaatcaatcagatgaccgctgtacttactggcatcggcgagcggactaagtaactcctgagcagagactttttcatagcgccattggctggaatgattgtagaaaaagctggtgctgttcatttggcgcggtggtcggttccagtcgagcgcaaaggccagtggcaaccagccggtttgtgggcgcagtttttcctggccgacatagtgtgcccagccgccaccgctttgcccgacacaaccgcagaagatcagcatattgatcatcccgcggtagttcatgtccatgtgataccagtggttaacacctgcgccgaggataatcatgctgcgcccatgcgttttatgggcggtatcggcaaattcacgggcgatggtttcaatatactggcgcggcacgccggtaatttgctcaccccaggctggggtgtacggtttgatttcagcgtaatctttcgcactgttttcatcttccagcccgcgatcgaggccgtaattcgccagtaccaaatcataaacgctgaccaccggacaggtgttgccatcgactaacgtcaggtttttaacgggcaattggcgcaccagcaccggattgtgttttacgctgcgaaaatgcggattttcaatgccgccaaagtaggggaaggccacgcctgcaacagcgtcatgttgaccgagcagggttaagctcaattcggtttccgtaccggcggcaatggattccagattccatttgcctttttctccccagcggaaaccaatgctaccgttcggcactaccaattcacctgcggtattaactgctacggttttccactgcggattgttgctttcgcccagtccatccaccaggtcagatgcgcggatcatgcgcccgggaacgtagctaccatcgtcgcgaggctccagcattaccagcatcggcatgtcgctgtagcggcggcagtagttgataaagtagtcgctgggattatcgagatgaaactcttttaaaatcacatggcccattgccatcgccagggcgctatcagtgccttgtttcggtgccagccactggtcgcacaatttggccacttcagagtagtcaggggtaatggcgatggttttagtgcctttgtagcgtacttcggtaaagaagtgggcgtccggcgtacgtgtctgcggtacgttagacccccaggcgatgatgtagctggagttataccagtcggcagattccggtacgtcggtttgctcgccccaggtcatcgggctggcgggcggcaggtcgcaataccagtcgtagaaacttaaacaggtgccgccaagcaggctcagataacgcgttccggcggcgtaagaaaccatgctcatcgccgggatcgggctgaaaccggcaacgcgatccgggccgtaggttttgatggtccagacgttagcggcggcaatcagctggtttagttcctgccagttggagcggataaacccgccgcgcccacgcacttgtttgtagctcaggcacttttgcggatcgttcataatgcttgcccacgccagtaccggatcgctgtgttgcttgagggcttcgcgccacagttcaatcagtcgtttacgaatgagcgggtatttcaggcggttagcgctgtaaagataccaggagtaacttgcgccacgcgggcagccgcgaggttcatgattgggcaggtcagggcgagtgcgcgggtagtcggtctgttggatttcccaggtcaccagaccatttttaacgtagattttccagctacaggagcctgtacagttaacaccgtgggtggaacgcacgattttgtcgaactgccaacgctggcgatagctgtcctcccagtcgcggttgctatgcatcacctgtccgtgaccatcggcaaaggtttcgcccttttgtttgaagtagcgaaagcgatccaaaagtttactcatgacatgactcctgctccaggaatgaattgggatctgatgccttgtcggatgcgacacggttgtacatcaggcatcgatctcttatttttggctgaacttccgccgaccataaaccagccaggtcagcagcacacaaacgatgtagaagattaaaaacactttcatcgcgccgaccggagagccggtcatattgaggctcatgccaaacgcctgcggaataaaaaagccgcccactgcgccaatggcactgataaagcccagagccgccgccgtttcggtgacggcttcttcatgagcttgctcatcactaccgcctttcatctttacccgataaatggttatctggcgaaagatgacggcgatcatctggaaagtagaaccacttcccagacccgcagtcagaaacagccccataaatacggcgtaaaaggcgatgaaattaccggagcctgtgcccggtaaggtaaggaacagcagggcactgaaaatcgccataaaaataaagttgatcaacgtcacccgcacgccgccgaacttatcggaaatagcaccaccaacgctccgcgcgatggcaccgataaatgggccaaagaacgccaggcgcagaatattcacatccgggaactgggtttttgccagcatggcaaaacccgcagaaaaaccgataaagctaccgaaggtggcaaggtaaagcaggctcagcagccagagatgcaggcgttgtaagacagggagctggtcggcaatactggcgcgactactggcgatatcattcatcccactccatgcggcgatcgtggcaatcgccagtagcggtacccaaatccatgcggcattcgccaggctcatcacgctaccgtcggcctgcggtacgccattgacgccgagaaaggcaaatacaggtacaaaaatgaccagcggtgcaaccagctgcattacacttacacctaagtttcctaatccgccattaatcccaagagcgctcccttgtttggcttttggaaagaagaaactgatattgcccatgctgctagcaaagtttgcacctgcaaaaccgcatagcaaagcgataacgataaatatcccaaaaggagtattcggattttgcacggcaattccgagccagacgcaaggaataatcaggattgcagtactaaaaaccgtccatcggcgtccaccgaatataggcaccataaaggagtagggaacacgcaataatgcgccagaaacggagggtaatgcggttaataaaaagagttgatcggtagtaaaattaaaaccgattttattgagattaacggtaactgcgctaaatagcatccagacacagaaggcaagaagtagacaactgacacttatccagagatttcttcgagcaatatgttttcctttattttcccagaaggccggattttctggtttccagtcgcgcaaaagataacgactatttttctcattttgcagtgccatattgttcctcacatgcacacattggtaatgaaaaaaagacaaaacacgaggtaaggcgcaatagccagttattagaattaaggatgaattgggtgaagtgctgattgaaagaatagataagaaagcgtaaccgcgggggcagaatggggattaagtagccagatatgtgttactaaatgtaactaacaagctaaccttcaaacggggttaatctttgaacgtatgtcatgtttcaacccttcagatcgtgaatctaaagggttacatattaactatattatcaacaagaccagacacttatagaattagtgatgatttattcattaaaaaggccaactactggaggaaaagcttctgtccagaaggtctatcggttcctctcttattgcctgattgtaataatcgttattacagtaagtattgtttatttcatctaaggtcatgtttttaacttttatattcatctggtttacaacttcctctgtcttgtaagtgtgtatattatatggggtatatgcttttttaataggatagtgaaacaattcgttatccacatctattccgtcagagtgaacttcaaatgcaccagggctaagaattgccaggccagtattaagcttaagtgctggggaaaacaaattaaataacatgagctgcatagtagggcaattgttcttcccagaaacatttaaaaaatttaagttttgctctgttttattatggggaataaagttccaatatcggatgtattattagtatcaatgtgggttattttattattgtccagtcttaaacttttgatagatggaagataagtcaggaaatcaagatttatatatttcaactggttgttagcagcgtttaatgtctgaacattgcagaagttgctatagaatattttaatttcagaaagcaaattgttgttaataagtaacgtattcaagttgggaaataagtcattgtgtaaacttgttagtttattatgggatagatccagcagtaagagttcatttttattacctgcaacaatatcagttaattgattatggctgagattcaggtattgcagccattcgcaagattctaattgcacaaactctagttgattatgtgccgcactaaaataagtaacactactaagcctatctatatcaatatttctgagagcattattattcatagatatatgtgtaatacttacatttctgccttgaggaaaatttatactctcaagagcattactattcagacttagctttacgagtctatcgtagttggttgcatcaaaatgtgtgaattggttattatcaagattgatagatgtgaagttttgcagccctggtggttgagtggttaaattaagtccacttaaatcaatggtcacttcattagtgtcatcaattatatttcttactgcagtccagtactgcatttgtgcaagtggatcattgttgatgccgttaactaatacatgccaaagatgtttactacttattagttgatcaatgtcattggttggcagtaaattgttattgcttaagtttaaatattccagttttgtagtgtttttggcgtttaaatgtgcaatatggttgtcgtttaaagtgattgttttcatcctgggatgattgtgtaatataaggtcagtgatcatattgtgatgggcacttaactcaatcagagattcttgccgcggctgccgttggcttcatcgttatagcctttaaaatcatattcccagtgaccaaaaccaatcatttgatcattgatttgcgtttctcctttaaagccgagacgggcataagttttatcaccatcgtcacgcttatcatcagtaaaataacgtagagcggtaaccttgccataaaggtcgagtttattaccatccttgttatagacttcggcagcgtgtgctacgttcgcagctaacaaaccagttacaaccaccgcaactatttttaatttcatttaacagaatccttttaattatcgttaaacgtattttctaaacgaattttaaacggcgtcatttataaatgacatactgtttttaaaatagaatggtgattaaaaacaatgagaaaaatagatgaaataatattatttatcgatatgtgatcgaagtcgaaatgagatataaggtgaattactggtatttgaaatttatttttttaatattgtcggaatttatctgattaactaccgggccgtagacccggcagttattttaaccacgacgtgtcgccagccagcagagcagggaaccgccgcagaccatcagcgcgccttgccagaagctgaagctcagcggggcgctgagcagcacggctgcaagcgcactggaaagtacaggcgtaaaatagctacctaccgccataatggtgacattgccatgcaatataccgacattccatgcagcataagcaaatcctaaggtaaatgccgcagagatgagtttaatcatgacgggcgtgctaaatatcatttctggttgtggcgtaagaaaatagtaaacccacagacttgctcccgttagcaggacaaaaacggtaattccattaaatccgcgtgcgtatttattcgttactgtgcaataggctgcccagataaacgcaccaatgaacgccaggaaataactcaatgggctggtggtgatattattgatgatttcatcataatgtaacccattgtcaccgcctaacacccaacagacgccgacgagggctaataataatccaggtacaatcaaccagttggttttctgaccattaaacagaatggcaaagagaattgtcaggctgggccacagatagttcaccatacccacttcaatcgcctgatgatgggtcgccgcataccctaaggaaagcgccagacagatttcatagctgacgaataacagactcccggcgagtaaatagcctttcgggatttgccgaatacgcggaaatccaaccgtgaagattaacagcagcccgcttaaactatagatagcagctgcgccgccgaccgggccgagcccctcactgacaccgcgaatcaatcctaccatcgtgctccacaggacgatcgctatcagccctatgagcgttgctttttgtcgtgtcatgctcgctgttttgtctctcttgccgttaaaaattaagctgaattttatagcatttttttaactggcctgtcaggcagtggtgcgtttttctaccgctattgaggtaggtcaatttgcgaaggcggattattttgtggcaaacagatgttctttttgatttcgcgcaaaaagattcagaattttactgttagtttcctcgcgcagtaatacccctgaaaaaagaggaaagcaatggacgtcagtcgcagacaattttttaaaatctgcgcgggcggtatggctggaacaacagtagcggcattgggctttgccccgaagcaagcactggctcaggcgcgaaactacaaattattacgcgctaaagagatccgtaacacctgcacatactgttccgtaggttgcgggctattgatgtatagcctgggtgatggcgcaaaaaacgccagagaagcgatttatcacattgaaggtgacccggatcatccggtaagccgtggtgcgctgtgcccgaaaggggccggtttgctggattacgtcaacagtgaaaaccgtctgcgctacccggaatatcgtgcgccaggttctgacaaatggcagcgcattagctgggaagaagcattctcccgtattgcgaagctgatgaaagctgaccgtgacgctaactttattgaaaagaacgagcagggcgtaacggtaaaccgttggctttctaccggtatgctgtgtgcctccggtgccagcaacgaaaccgggatgctgacccagaaatttgcccgctccctcgggatgctggcggtagacaaccaggcgcgcgtctgacacggaccaacggtagcaagtcttgctccaacatttggtcgcggtgcgatgaccaaccactgggtggatatcaaaaacgctaacgtcgtgatggtgatgggcggtaacgctgctgaagcgcatcccgtcggtttccgctgggcgatggaagcgaaaaacaacaacgacgcaaccttgatcgttgtcgatccccgttttacgcgtaccgcttctgtggcggatatttacgcgcctattcgttccggtacggacattacgttcctgtctggcgttttgcgctacctgatcgaaaacaacaaaatcaacgccgaatacgttaagcattacaccaacgccagcctgctggtgcgtgatgattttgctttcgaagacggtctgttcagcggctacgacgctgaaaaacgtcaatacgataaaagctcctggaactatcagctcgatgaaaacggctatgcgaaacgcgatgaaacactgactcatccgcgctgtgtgtggaacctgctgaaagagcacgtttcccgctacacgccggacgtcgttgaaaacatctgcggtacgccaaaagccgacttcctgaaagtgtgtgaagtgctggcctccaccagcgcaccggatcgcacaaccaccttcctgtacgcgctgggctggacgcagcacactgtgggtgcgcagaacatccgtactatggcgatgatccagttgctgctcggtaacatgggtatggccggtggcggcgtgaacgcattgcgtggtcactccaacattcagggcttgactgacttaggcctgctctctaccagcctgccaggttatctgacgctgccgagtgaaaaacaggttgatttgcagagctatctggaagcgaacacgccgaaagcgacgctggctgatcaggtgaactactggagcaactatccgaagttcttcgttagcctgatgaaatctttctatggcgatgccgcgcagaaagagaacaactggggctatgactggctgccgaagtgggaccagacctacgacgtcatcaagtatttcaacatgatggatgaaggcaaagtcaccggttatttctgccagggctttaacccggttgcgtccttcccggacaaaaacaaagtggtgagctgcctgagcaagctgaagtacatggtggttatcgatccgctggtgactgaaacctctaccttctggcagaaccacggtgagagcaacgatgtcgatccggcgtctattcagactgaagtattccgtctgcctagcacctgctttgctgaagaagatggttctatcgctaactccggtcgctggttgcagtggcactggaaaggtcaggacgcgccgggcgaagcgcgtaacgacggtgaaattctggcgggtatctaccatcatctgcgcgagctgtaccagtccgaaggtggtaaaggcgtagaaccgctgatgaagatgagctggaactacaagcagccgcacgaaccgcaatctgacgaagtggctaaagagaacaacggctacgcgctggaagatctctatgacgctaatggcgtgcttattgcgaagaaaggtcagttgctgagtagctttgcgcatctgcgtgatgacggtacaaccgcatcttcttgctggatctacaccggtagctggacagagcagggcaaccagatggctaaccgcgataactccgacccgtccggtctggggaatacgctgggatgggcctgggcgtggccgctcaaccgtcgcgtgctgtacaaccgtgctagcgcggatatcaacggtaaaccgtgggatccgaaacggatgctgatccagtggaacggcagcaagtggacgggtaacgatattcctgacttcggcaatgccgcaccgggtacgccaaccgggccgtttatcatgcagccggaagggatgggacgcctgtttgccatcaacaaaatggcggaaggtccgttcccggaacactacgagccgattgaaacgccgctgggcactaacccgctgcatccgaacgtggtgtctaacccggttgttcgtctgtatgaacaagacgcgctgcggatgggtaaaaaagagcagttcccgtatgtgggtacgacctatcgtctgaccgagcacttccacacctggaccaagcacgcattgctcaacgcaattgctcagccggaacagtttgtggaaatcagcgaaacgctggcggcggcgaaaggcattaataatggcgatcgtgtcactgtctccagcaagcgtggctttatccgcgcggtggctgtggtaacgcgtcgtctgaaaccgctgaatgtaaatggtcagcaggttgaaacggtgggtattccaatccactggggctttgagggtgtcgcgcgtaaaggttatatcgctaacactctgacgccgaatgtcggtgatgcaaacagccaaacgccggaatataaagcgttcttagtcaacatcgagaaggcgtaagggggcgaacagatggctatggaaacgcaggacattatcaaaaggtccgcaactaactccatcacgccgccttctcaggtgcgtgattacaaagcagaagtcgcaaaacttatcgacgtttccacctgtatcggctgtaaagcctgtcaggtggcgtgtagcgagtggaacgacatccgtgatgaagtggggcactgcgtcggggtttacgataaccccgccgatctgagcgccaagtcctggacggtgatgcgctttagcgaaaccgaacagaacggcaagctggagtggctgatccgtaaagacggctgtatgcactgtgaagatcccggctgcctgaaggcgtgcccgtctgctggtgcaatcattcagtacgctaacgggattgtcgatttccagagcgaaaactgcatcggctgtggttactgcattgccgggtgtccgtttaatattccgcgcctcaacaaagaggataaccgggtatataaatgcacgctctgcgtcgatcgcgtcagcgtcggccaggaaccggcttgtgtgaaaacctgtccgaccggggctatccacttcggcaccaagaaggagatgctggagctggcggaacagcgcgtggcgaaactgaaagcgcgtggttacgaacatgctggcgtctacaacccggaaggggtcggtggtacgcacgttatgtacgtgctgcatcacgccgatcagccggagctgtatcacggtctgccgaaagatccgaagatcgacaccagcgtaagcctgtggaaaggcgcgttgaaaccgctggcagcggctggctttattgccacttttgccgggttgattttccactacatcggtattggcccgaataaggaagtggacgatgacgaggaggatcatcatgagtaagagcaaaatgattgtgcgcaccaaatttattgatcgcgcctgtcactggaccgtggtgatttgcttcttcctggtggcgctgtccgggattagcttcttcttcccgacgctgcaatggctgacgcaaaccttcggtacgccgcagatgggacgcattttgcacccgttcttcggcattgcgattttcgtcgcactgatgtttatgtttgtgcgttttgtgcatcacaacatcccggataagaaagatattccgtggctgttgaacattgtcgaagtattgaaaggcaatgagcataaagtggcggatgtcggtaagtacaacgccgggcaaaagatgatgttctggagcatcatgagcatgattttcgtgctgctggtgaccggggtgattatctggcgtccgtactttgcgcagtacttcccgatgcaggttgttcgctacagcctgctgatccacgcggctgcgggtatcatcctgatccacgccatcctgatccatatgtatatggcattttgggtgaaaggaagcattaaagggatgatcgaagggaaggtaagtcgtcgctgggcgaagaaacaccatccgcgctggtatcgtgaaatcgagaaggcagaagcgaaaaaagagagtgaagaagggatataatctcttttgaactttaagctgaaaatggcgctgtaaaaggcgccattttcatattgtagacaacgtaggctttgttcatgccggatgcggcgtgaacgccttatccggcatgaaaacccttcaaatccaatagattgcagtgaacgtgtaggcctgataagcgtagcgcatcaggcaatgttgcgtttgtcatcagtttcaaatggcgctgtaaaaggcgtcattttcatattgtagacaacgtaggctttgttcatgccggatgcggcgtgaacgccttatccggcatgaaaacccttcaaatccaatagattgcagtgaacgtgtaggcctgataagcgtagcgcatcaggcaatgttgcgtttgtcatcagttctaaatggcgctttataaagtgccatttttttattgcgtaaccagacggcgtaatcggctcacatccactgttttttctgcctctgccagactccaggcgttttgcagattcagccacatttgcgggctactgccgatcaccacggaaagtttaatcgccatttctggcgtcaaagctgcttttcctgtcagcaatcggcttgccgtactgggagcaatttccattgctctggcaaactcgcgcaggctgacattaagttcgtccagactttcctgaataatgtcccccgggcggggatgattggccattttcattagtgtctttactctcagtagcgttccttcactgggaacactatcattattgttccttcctacgcaacaataatccatttagccatttcatgttggagagtgtgcgatgctgcgacccgaacatggcagtcgcagcaaaggcctcttagtgacggaaatcaatcaccatgcggccacggattttgccttcttccatctcagtaaagatggtgttgatgtccgctaacggacgcagggcgactttcggcaccactttaccttcggcggcaaactggaaggcttcagttaaatcctggcgcgtgccgaccaggctaccgaccacttcaataccatccagcacaagacgtgggatatccaggctcatagactccggcggtagaccgacagccacaacacgaccgcctgcacggacagcatcaactgcgctgttaaacgcagctttagctaccgctgttaccaccgcagcgtgagcgccaccagttttctcctgcacaattttggcggcgtcttcggtgtgactgttaatcgctaaatctgcgcccatttcggttgccagttttaactgctcatcattgacatcaatggcgatcactttggcgttaaagacattcttcgcgtattgcagggcgaggttacccagaccgccaagaccgtagatagcaatccactgccctggacgaattttactcagcttaacggctttgtaggtggtgactcccgcacaggtaatgctgctggccgccgcgctgtccagaccatctggcacttttaccgcgtaatcggcgaccacgatgcactcttccgccatcccgccatcaacgctgtatccggcatttttaacactacggcagagcgtttcgttaccactgttacagtattcgcaatgaccgcatccttcgtagaaccacgccacgctggcacgatcgcctggttttaaactggtgacacctggacccacttctgccaccacaccgatgccttcatggcccagaattacgccggttttgtcaccaaaatcgccattcttaacatgaagatcggtatgacatacaccacaacactccattttcagcagggcttcgccatgtttcagactgcgcagtgttttatacgtaacgtcaacatgatgatccttcgtaacaactgcagccttcatagttcctccttttcggatgatgttctgcatagcaggtgaggcaaatgagatttattcgccactacccagtatggatgagatctgaaaaagggagagggaaatagcccggtagccttcactaccgggcgcaggcttagatggaggtacggcggtagtcgcggtattcggcttgccagaaattatcgtcaatggcctgttgcagggcttcggcagaggttttcaccgccacgccttgctgctgcgccattttgccaaccgcaaacgcaattgcgcgggagactttctgaatatctttcagttccggcagtaccataccttcgccgttcagcaccaatggactatactgcgccagcgtttcacttgcgctcatcagcatctcatcggtgatacgactcgcgccggaagcaataacacccaggccgatgcccgggaaaataaaggcgttgttacactgggcgatagggtagattttatctttccataccactggattaaacgggctgcccgtggcgaccagcgcgttaccttcggtccaggcgataatgtcctgcggtgtggcttccacgcgactcgtcgggttagacagcggcatcacgatcggacgcggacagtgtttatgcatctcacggatgatctcttccgtaaacagcccggtctgtccactgacgccaatcagaatatctggttttacattgcgcaccacatccagcagactcagcacatcgctgtcggtatcccagtcactgaggttttcgcgcttctgcaccagtttggtctggaaaggcagcaggttcggcatcttgtcagtcagcaagccaaagcgatcgaccataaagactttctgccgcgccgcttcctcgcttaatccttcgcgctgggtctgggagatgatcatttcggcaatgccgcatcccgcactacctgcgccaaggaagacgatttttttctcgcttaactgaccacctgccgcgcggcttgctgcgatcagtgtgccgactgttaccgccgcagtgccctgaatgtcatcgttaaaagaacaaatttcattgcgatagcggttaagtaacggcatcgcatttttttgagcaaagtcttcaaactgcaacagcacgtctggccagcgttgtttcacagcctggataaattcatcaacgaattcatagtattcgtcgtcagtgatacgcggattacgccagcccatatacagcggatcgttaagcagctgttggttgttcgttccgacatccagcaccaccggaagggtatacgccgggctgatgccgccacaggcggtatagaggctcagtttaccgatcggaatgcccatcccgccgatgccctggtcaccaagccccagaatgcgttcaccgtcagtcaccacaatcactttaatattatggttcggcacgttttgcagaatatcgtccatattgtgccggttctggtaagagataaacacgccgcgactacggcggtagatctcagaaaaacgctcacaggctgcgccgacggttggggtataaataacaggcatcatctcatcaagatgattgtttaccagacggtagaagagggtttcgttagtgtcctggatgttacgcaggtagatgtgtttgtcgatttcggttttgaatccctgatactggatccatgctcgttccgcttgttcttcgatggtttcgaccacttccggcagtaaccccagcaggttgaagttacggcgttcttccatgctgaaggcactgcctttattcaacaacggaaattccagcagtacagggccagcgtaagggatataaaggctacgctgtttttttgtttttggttccatgtcactcactcttttttgaatatccatccctggggggcttttatcgtctttgctttaccgccagggcgtcggcctcaagtataaagcagataaaaacaaaaacaccattgcgcaggcaatggtgtttaatcgtcattgaggactgatggttatgaattacttttcagcggggcgttttctgccggttgggttatttactacgctggatttgtcaccttcggtaactattttgcgctggttagaaattttatggtccagtccaagaatatgacgtgcctgacggttgcttttcattttaactcctcaatcctgtagctagttttaaggacaacatcgccgtagcgaagaaacacgtgctaaacccctaaattaggttgccgatcaagcatagcaccttaaagcgtagggtgctggccactgaccacataattgatcgtttgctggtagatatcactgaggatgtcgttatcagaagcttcaacccatttggtcagctccatgagaatgtcatcttcagtgacaacaccatgctgtgcccgaaggccttgctcaatggcattaaccagagcgggttctgctgtactattttctgcctgataataagtaaacatagtgattctccgtgtctgtgtatttatggtgtctgctacggatcgcagatttataaagcacattcagcatggcaaatatttgccgcttcgttgttaagattagtcctggttgatgatttttatattttaacaccatgatattcatagggattgtgattggtatgatccgattaatattgatacaatatcttttgggttatatattcccggtaatctattgtgggaatttaatttaagtgcagaagtaatattttcgccggattttattcggaatatcctgcttatcctcgtgctgtttctcacgtagtctataatttcctttttaagcccacaggagagcaacaatgacaatccataagaaaggtcaggcacactgggaaggcgatatcaaacgcgggaagggaacagtatccaccgagagtggcgtgctgaaccaacagccgtatggatttaacacgcgttttgaaggcgaaaaaggaaccaaccctgaagaactgattggcgcagcgcatgccgcatgtttcagtatggcgcttagtttaatgctgggggaagcgggattcacgccaacaagcattgataccaccgccgatgtgagcctggataaagtggatgccggttttgcgattacgaaaatcgcactgaagagtgaagttgcggtgccgggtattgatgcctctacctttgacggcataatccagaaagcaaaagcaggatgcccggtctctcaggtactgaaagcggaaattacgctggattaccagttgaaaagctaaagcattgccggatgacgcgtcaggcgcgtgaatgcctgatgcgttgttagcatctttacagcgcccgccagcaccggagctcacgtccgtcctcccttattgctaaactttgccggacttcacatccgtgggttgccagcgggcaacgttcgtagaaaaaacagccttgcggcaacgtgcggtttcccggcagatccgttttacgtaatgcccattcttcctccagcggtttatcaatggcggggagggaatccagcaataatcgggtgtatggatgtgcaggtgccgtcagcacctgctgcgcgtcgcccagttctacaatctgcccgagatacatcaccgccacccgatcgctcatatgacgtatcacgctgacattgtgactaatcagcacataggtcagcccgtgattttcctgtagcgttaccagtaaattgaggatctgcgcctgaacggagatatccagcgcagaggttggctcatcaagcacaatcacgtcaggctggctagagagtgctctggcaatggcgatacgttgccgctgcccgccggagaacgcatgaggcaggcggtcgagatactccggacgaatacccacctgcacagccaactcctctgccaacgctcgccgctgttgttcactactacgcttagctatccagagcggttctgtgatgatgcgccacaccggtaagcgcggattaaggctagagagcgggtcctgaaacaccatctgcataatgcgttgactgccagaacggatgtactgcccgtggctcggttgcagcatacccattaaaagctgtgcgagggtgcttttgccgcagccactctcgccgacgatccctaaggtttcaccacggcggatctgtaaatcaataccattaatggcatgaacatgttccgtagttttaccaagccagtttttacgggccgggaaattgatatggacgtcgcgtaacgttaataacgtgtcagacacttataacctcctgctgcggataccaacaggcacagcgctggttgttgtcaccacacgctgtcagcgccgggacgttttcacactgtgcacctgccgcatagcaacgatcgcgaaaagcgcagccgtcaggcaaatgggtgaggtttggtaccgtccctggaatggcgggtaatagctggcgtggtactccatgttctggtgcgcattgcagcaaaccaatggtatacggatgccggggatgatggataacgtctgccgtcacgccgctttcaattacgcttccggcatacatcacgtaaacgctatcgcacagttggctcaccacggccatatcatggctgatgaacagaaccgcagttccactggcgcgggctttatgtttaagcaaacgcagtacctgcaactgcaccgtgacgtccagcgccgtagtcggttcgtcggcaataatcaattgcggctcgcaggagaatgccagcgcaatcattacccgctggcgcataccaccactaagctcaaacggatagcggctcataacttccacggcatccgggatttgcatctcttccagcaggtcaatcgctttagctctggcttcccgacgacttattggttgatgatggcggatcacgtccatcatctgaagacctattcgacgtgtcggattgaggtcggtcatcggttcctgaaagatcatcgccactcgtgcgccgcgccactgacgaagctgtttttcccgcgcgttaagaacatcttctcccagcagggaaatctgcccccgatgtacgcaataactgcccgtcggtagcagacgcataatcagcattgcggtgacacttttaccactgccggattctcccaccagaccgacaatttcaccgcggttaatctgcaaggacacattgttgagcgcgtgaacatcaccgttaaaaccggggaaactcaaatgcagttgttgaatgtccagaacgggttgggtcatgactgctttcctcctgctttttagttcaactctgctttcctcctgctttcgggtcaagcagatcgcgaataccatcaccaaagagattaaacccgacggcggtaagcaaaatcgctgcccccggaaatgcgcaataccaccactgatcgagtacatagttgcgaccatttgctaccatcgcgccccattcagcactcggttgttgagcacccaggccaataaatcccaacgtggcggccattaaaatcgcgctaccgatatccaggcttgcctgcacgatcagcggcggtagggagttacgtaaaatatgccagttgatcagatgccaacgagacgcgccaaaggttttcgccgcctgaacataggtatactggcgtacaactaatgcttgcccccgcgccaggcgcacataaaagggaattcgcacaatagcaatagccagcatggcgttaaacaaactcggcccgagagcggcagccagtgccattgtcagtaccaagctaggaatgctcagcataatgtccatgatgcgcatgatgatggcgtctgcgcgtccaccaagcacaccggatagacatccgagtaggctaccaatcatacccgcaatggcaaccacgactaatccggcgagaatactttgctgactgccgaccagtacgcggctaaacagatcgcgtcccacttcatcggtgccaaaccagtgcgccgcagaaggcggcaaaaggcgggcggttaaatcaatggcgttgggatcatgcgtcgccagccacggactaaaaatcatcatcaatagcattaatacaatgatgactgcgctggtcacggtgagcggactgcctttcagcatccataccagttttgcaccgttaaatcgcgtttgtttttgtgggcgtacggcggacgtttcctcgcttagcatcattcaccacctccacgtccgatacgcggatcaatccacaaatagagcaaatccaccaccaggttgaccagcacataagcaaaactaaccacgacggcaaagcccatcactgccgggaagtcgagcgcctgtatacttgttactacccatgcacccattccgggccaggcaaaaacggtttcggtgagcactgcgccatacaacaaatcgcccagcgccaaacccaatacggtaatgcttgggatcaacgcattgggtagcgcataacataaaacgatataccagccgggcaagccgctggcccgggcggtacgaatgtagtcttcactcaattgttccagcatcgcactgcggatctggcgagcgacaattcccaggtgaacgaacgccagcgttaatgccggtaagatgagatgttgcaacgcattgaagaagacttcaccgttgccttcaagcagcgcatcgagcagataaaagccggtaacgtgcgttggtggatccagccagtcatcaagccttccgccgccgggaagaatttgcagatgaccataaaacagcacaatgacgcccagcccaagccagaacgcaggtgtggagattccggtaatggccattattcgcaccagatgatccagccagcgatttcgccagactgcagagagtatgcccagcgggatgccaatcaggagtgccagcagcagggcaccaaaagccagctccagcgtcgccgggaaaaatatacgcaactcttccagcaccggacgcccggtacgaatggatgttcccaggtcaccatgaaacaggtcgctgacgtagcggtaaaactgtacatacagtggctggtccagtcccagttgctggcgaatattttccacgatagcatcgctggcgcggtcacccgccagtaaccgcgccggatcaccagggatcagatggctgataataaacgtaatcacgcagacgcccgccaccacgagcaccagcccccagcagcgttggcgtaaaatactccagaaggtcacgttatttactcatggtattgatattgaagacctgttccagcatgggattgaacacaaagcctttcacctctttgttcatcgccagttggtagtttttctggaacaggtacacataagcagcgtcatcaatgacgattttctgtgcctgctggtagtcccgggtacgctgcgtctggtcggtggtcgcaagcgcattgcgcagtaacttatcgacctcactgttttcatagaagctgcggttacccggcagaccttttttgtcactctcaaaccagtaattcataaacatatacgggtcggcaaaatccggactccagttgccaatcgcaatgtcgtaatcacctttacccactctgtcgcgcatggtggcgttcgccagcttttccagcttcacaatgatgcccagcttgttgagactggattgtgtcgccagagcaataggctcccagttcggatcgttatcggagtagagaaacgtcaggctggtgggtttgctcgtcactttatcccattcggctttggctttcgtttcgtcatggttgtattgcattgccgtcgcatcgtagccccacatgccttccggaatcgggccgcgcatctgttttccgttaccactcagaatgccgttaaccatgccctgataatcggtagaccaggaaatggcccgacgcagatccgcctgattaagaggcgctttgctgttattcagatacagataggtaacgcgcagactcggatactctgccacattgactttattttcctgcttcagggcgttgagttgatccaccggcagcgcatcggcaatgtcaatgtcgccacgggagagctgcaggcgacgggaggcactttcaccaataatttttacgcttacccgtttgaagttcggtttattgcctgggtaatgcggatttggcaccagaactaattgctgacctttttgccagcttttcagcataaatggtccggaaccggcggtattttgcgcgaggaagccgcgagcatcatccgctgcatgttcctttaagaccgccggattgataatggatgcaccgtcattcgccagcgtgtagaggaacggtgcgaatggttggctaagggtaaacttcaccgtatgttcgtcgggagcatcaatctttaaatctttgggaaatgcttctgctggcccctggccgatttttagtagccgctcaaaagaaagttttactgcttcggcagtgacaggtgtgccatcggcaaatttagcattatctttcagggtgaacgtccactctttttgatcgtcagacgctttccagctacttgccagatcgccttcaacgtcggtactgcctttatcaccgtccgttttgtactgaaccagccgctgataagacgggtaggtcactgtccagtcgttattatctattgttaccgccgggtcgagggtttgtggatcggcggccttaccaatcaccagcatatcttttggtacggcggcgtgcgcaaccgggaaatttgtggcaaggacgagcgcgagcaatgtgggacgaaagcttatgcttctcttcatgacagtttcctgattaactgacgtgctgtgtgccaggggatataaaacaagagaattgatcagcgagcagagggtaactcgctgcctggggtaattcgaagtgccaccattcgctggagataccgacaaaaccgccaccagtcattatcgcattcagcaacagccgattgcgctgagcggcgggcgggacggaagggtgataggcatgggagcgctcgtgcatttcatcgaaccctgcgcccatatcgaggatgttcccgtgctcatcacgaagcgtcaggtcgatcgccgtgccacggctgtgattagaaccgaccgtcacatcaacaacatattgcgggtctgggcaggcttgccacaacatcgcctgtgcttgttgtgggcgatacgcatcgtaaatcaccagttgtaacccactcagctgggcgatgctgatacttttcgccagcgcggtaatcgcatccttgtgtaacagacaacgcgcttgctgataaatagctttacctgtgatgttatcagcgcaggcgtatttcaattcgatctccagatcagggaagattacggctaaatcaaccagttcggtggtatcgctcataaacggttcctgtataagacaaaaattgctgcgctttccgcttatgcagatctcatgccatgccgggataagcgccagaatgctggcttaaagttatattttttaacttttgatcaacatttgtgcagcgtagtgcagttttggtgcaagaggggaagttaaggaaggaatctcccggaatcgtagctgaaatcacagtatttaagtgacagtgtcacgttaaatgaaaacccgcgagtgcgggcgagaggaatttgtcagattttcagcggtaacacgctgctcatccagcctggaatttcttcggcgggtagggggcgggaaaagaaatatccctgaataacgcgacagtggatcttgcgtagcatctcaaattgctctttggtttcgacgccttccgccacgacggttaaattgaggctttgcccaatgctggtaatggcttcaagtaaggcaaggatgcgtttttcggtcagacaacgatcgacaaaacttttgtcaattttgatttccgttaccggaagactgactaagcgggataatccggaaaagcccgtaccaaaatcatctacgcttaagcccacgcccatatcacgcaggatctgaatgcgcttaaagatttcggtatcgtgttccatcatcatgctttccgtgatttctaccgtcagctggtggccgtcaataccccaggcgtgcattgcatcagacacctgattaggcagttgattactgcgaaagtgcagcgcgctcaagttcacggataacgccgggatatgaatattctggctacgccattctgctaactgacggcaagcttccgcgatgacccagcgcccaatattttcgatttcaccaatctcttctgcgagaggaataaaccgactagggggcacatgaccatgcaggggatcgtgccagcgagcaagggcttcgatgccgtacagttcacccgtttctgcgaagatttgcggctggtaaaccagtttcagttggttattgctaatcgcttctttcagcgctgcgcctaaaaccaaacgctcttttaccatttcgttcatcgccgggctgaagaactgccagccgttaccgccattcttgcgaatataatccattgcattgtgagcagtggagagcaagtaatcgcggtttttacccaggtcgtagctgatgccaatactcaaggtaagcgggaagggtttatcgtcaatcattatcggcttgctgaccacattccgtagctcatcggcgatttgggtaatgttactgacgtcgttttcgaggctcacgaggacaaactgcgtaccttcgatacgacagagatactgatccggtttgagtttttcacgaaagcgattgaccacttccagcaatgcctgatcggcccacgcatagccaaggctatcaatcacatcctgaatatggtcaacaccgatgagatacaccacgggagagacggctttgtcgaccaggtcatcgaggtaattgtgcaggttattgcgatttggcagaccggtcatcggatcaaattggatgagttgttcaatatgctgacggcttttttcctgttccagcgccagcgcggccatatgctggctgatatctgccacgcgttcgataaaggcgctggtttctgctccactgctggttttaatttgcaggatccccgcaggcgcgccatcacgctgacgaatggtcgcactccagctttgcgcattttgaatttctgcaccgtgggaagaactcgcccagtgtatcggcatcccgttgcgcagtgcgaacaggctaacatggctttcgttgagtacagattcgatgttacgacaaatgatttcccccatttcatgaaatggcgggctgctgcacatggcggcgagaatattgccttcaagctggcgaatctgccgttcttcggtgatatcgctgaaagtcattaccaggttctgcagatgcgcgagcacgtcataaaccgggctgatagaggctttaatccagattttttcaccggtgcgcgtcaacagcagaaattcgtcctgatcgcgggcggttttccatagcaactgttgtaaacgaatgcggttatcggcagggaattcaggaatgttcaggagtgtatcgggctgcataccgctggcttcgctaatgcagtaaccaaacatttcggtaaatgcgcgattgcactgcacaatatggcgttccggatcgaggacaatcaccggtcggtcgagatggtcaacggcaataatcaattgtcgggtctgttctttttgcgccatttctacgctggcatcccgtaccagcgccaggtaataaactttcccctcggcgctcactttgcttagcgcaaaacgggtccagattttactgccgtcttttttctccagctgcagctcccgactcatcccctcaacacgcgctttaccgccttcacggttgtgacgaatgtattcaggatgcgcaggacgcaaatcccgcggaatcagcatatcaatgttattgccaatgacttcttcacgtttgtatccccagagcttctctgcggcggggttgaaaaacatcacttcatcattttcgttaattaacaccgcacccatcatattttgctcaagggcggggaaaaaaatgccatcggcggcattatccgcatcggttagcttcatgattacctctgcatcctggcgcatttaaagactggctttccagagttcaacacggtttctacctcgtcttttggcgatatacagagcttcatcggctatttgaatgaggcgctcatagtcaggatgaccattaaacatggcggcaccgatggaaagactgagggcaatatcttcgccgtttgcggctttcagtttggttttctccacccgactgcgaatacgttctgcggtacgtaacgtttcgttttcagaagcttcagtcaaaacaatgataaattcatcgcccccgtagcggaaaacataatcactactgcggacgttgtcataaaaggcctgagagactttacgcagaatttcatcaccagtgttatggccccacgtatcgttgatctctttgaatttatcaacgtcaataatcagcacactcagcggtgtaccggtccggttggcatgggcaatttcgcgtttgaagatagtcggtaggaaacggcggttaagtaatttcgtcagtacatccataccgacttcgtggcggcttacttcttcaaacaattcacgcagcaaggtaataatttggcttacggtatttcttatctgtaataaaaatttcacccgcagacttctgttattcaaatttctggtgttacgcatggtttgattgaaaataccgtcgaaatcctgaatcagacgggagatatggcctacttcggcaataccactaaaataatgtcgacctttatggttaaaccacaggccaaaatcagcctggcttaaaggcaaactactgcctaaatcagaatccagcaggattttatagataatatctatttcccaactaagtatactggctatttgccgttctttttcttcttcggcgttttccagtaagctgaagatacgatagttttcatcttccttactggcactactgtcactaaaggtaaacgcgcgagtcatcacttccatcgcgatatcaatactgttaatgctgaaatggtagacctgaagtttttctgcggcggaataatcgctagagaagatcaccggatagaggatttttttcagcacccgaaaccccatctcgacaatttctaccggaattcctatgcgggcatgcacttccgcgacggtatgctggatttgtattagcctttcgacatcgtcaacctgggcagaaagcacgttaataatccagcgttccatcgcactcttcaactgccgctcaacttgttcattactcaagaattcttcggcatgcgggtcgatgcggacaattcgataaaactcgatactcagataatgagcatgcgcaacggcaatttccgcggctttagcacgaatgggcggatctgcctgttcgacaagtccggtccactcatctttcattcttttaaaatacatctccataattcacacccttataaggctgggaaatcagacggaatcaaaatgaaacgcaacgtgcgagatcgactaactgcaccatattctcctgaaatatgaagatatactgaaaagaaataagcgatttaggacagtttcaatctacgctactgttcttcagaagagtatagcccatcgtaattatttttcggtgacagcgaatatcgtatggtttttcatattcatacatttttattagggatttatggctgtttaactaagtgtggttaatttgacttaagtaagcatgattattagtgggatagtttaagagggtaacaagccggtgggtaaagcaccggcttgttacaaagtaagaatgggagtttaactgccccagcgactttgcagatagctgaccgcttgttgagtctgcggtttattcagatagtcctcacggaacaagatggtgccgctaatttcgggcacagcatcgttaagatcgagctgctttttcagttccggtacgccgccgttaatcatccagtctggctctatcttactaggttcacccactttatagaaggcgataccgatatacaggcgggtcctggtcggtttaacgacatccgcccaccattttgccaacacgtcataacgcgcggcactccgactgaacggccagtaaatttggggagcaatgtaatccagcaatccttgttccacccatcgacgggtgtcagcgtaggattcgtcataggctgccgcgcctcgggtatcggaaccgagcggatcgtgacttcggttacgccacacgcctgccgggctaacaccaaattcgactcccggcttaatgcttttaatggtgtggcttacctttgcaattaactgctgagtattgttgcgccgccagtctgctttactcgcaaatgcgcctccgtatttacggtacgtttcgttatcatttagccgactacccggactctccgtatagaaatagtcgtcaaactgcacgccatctacgggatagcgggaaaccacttctgcgactatacttgtgatccagtcctgaacctcagggatgcccgggtcgaggacaaagcgatcgccagacgttctgatccagtcgcggtgttgcacatagacgctcgccggttgttgagacagagtgctattcagttccctgatagtaccgggcttcgtattaacgcttacgcgataggggttaaaccaggcgtgtactttcatcccacgcttgtgggcttcgtcgagcataaattgcagcggatcgtaacccggattttcaccaatcttaccggtcataagatcggaccacggcaaaattttgcttggccacagggcggtaccgtccggcttgacctggaaaaagaccgtgtttatgccgagacgttgcagatgatccagtttgtcgatcatcgcctgttgttgtacacgggcccggctggtggggttactaatgttaacgctggaaaccggtggccagtcgagccgagaaaccgtggccagccagatgccacgcatcggttgactgctttgttgcgtcgtggctggtggcttactacctgctggtggtgtcaccatggactctggaggcgtgcttttacaactacacagtaaaagtgccagtgcaactagtatcgctggtcttctaatcgttaatttcttgtttcgggagcagatatccatatgtgctggtttccggtaaacagatgtgcgctcattctcgtacttatccccgttaagtcaatacgacagcaagcacgaaaaagggagcgatgaattatcgctcccttgtcttataaccattcagacatggttagtgtttcttgtcattcatcacaatatagtgtggactacgtgcacgcgggtgcaggaagaagtgaccttttggtgcgttctgactgttgattggctccagagtgacgccggtatttgctttgcctttacgatcatgaacagcatagagaataaagggcagggcaagtaccaccaggaaactaacaaccagtaattcaacatacatatcggtagaatcaccctggatgttatccggcggcaggaaggaaacaataaacgccataatactagtcagcagaccgacaattgccacgaccagtttcacccctttaccaccagggatattaaatgtgcgttttaagtcaggatgtttaagaaccaacacaatgtagccaataaacagcatgaaataagcacacagataaatcaccaccgtcagcgccagtgcgatcaggaaggacatgttgttaccgccaccggtattggtgaggatgatcaacgcgatagacgtaatcaccagctggctaatgaccagcgttaccggtacgccatttttgttcattttagcgaatgccgctggcagcaggtttttctgcgctgttacatacatcccgcgagaaggaccaacaatccaggaggcgatttccgccagaacacccagcaacagcagtgcggagatcacgcgaaccgtccactcaatttctggtgccacatgggacatcagaacggtaaaggtttgcattacccctgcggagaggttgatttcattacccggaatgaccatcgcaatagacaaaccaccaacagagcttaagcagattgccgccaccatcagcagtaacatagccaacggatagtcgcgccctgggttgctcatttcattgacgtgggttgcggatgcttctacgcccatataactcaaaatgaaggcaacaaatactaccagggtgcccactttagagaagtcagggaagaaggtcttgctatccatttcgatagcaacgggggcaccggagtgcagataaatagccgctaatgcgatcaaaataaatgcaggtaacaggataccggcgaagaagccaactttagcaattcgcgccgtgtatttcgtgccaccaaactgcgttaatgccagcgcccaaagaatgatgagtgctgcaatagttttggtaatggggtcttcattcagcgctggccatttcaggatgtaggagagtgcccctaacacgaaatagagcatcggaataaaaccaatggcgatttgcagatagccaaaactgatcgctgcaaatccccatctcggccccagagtattacttacccaggcgaagacaccaccttcttcccagccgtcgacggtggccatttccgcagcacaaagtcccacgggaataaaccataaaatcccgcctaatagcaggaagaagactaaactaaagccgcttgttgcgaaggtagggtattcataaacagccattaccatgcttgccgttatggcaaagaatccaagtaatgtgagctgcttagctttacctgtctgtacacttgtagccatattatccccctaaaacggtattcctgtcggaaccgcacctgttttgttctgaagcgtattcagaacaatattttccgttgctaatgccagtgaacagactttggaaattgtcccgaaacgggttcgtttcgggacaccgttaccgttaaacgttatcaggtatgtttaaagctgttctgttgggcaataccctgcagtttcgggtgatcgctgagatatttcagggaggctttgtagtcttccagcaacagttcagcaaagtccatttcgaagccgcgacgacacataatgcgcatcaccacgatgtcggtggcttcaccgccgagagtgaaggccggaacctgccagccgcgcagacgcagacgttcagagaggtcatacagggtgtatcccggatcttcaccatctttcagtttgaagcaaaccgccgggatgccttcgtccgggcgacccgtacagatgaactcatacggccccagtttggcgatttcatccgccagataagcggcaacctggtaagaggcgttctgtactttggtatagccttcacgaccgaggcgcaggaattcatagtactgtgcaattacctgacccgccgggcgggagaagttgatggcaaaagtaccaatttgaccacccaggtagtcaacgttgaacaccagttcctgcggcagcgcttcttcgtcacgccagataacccagccgcagcccagcggagccagaccgaatttatggccactagcactgatgcttttcacacgcggcaggcggaagtcccagacgatatccggggcgacgaacggtgccaggaagccaccgctggcagcgtcgatgtgcatgtcgatgtcgataccggtatcggcctggaatttatccagcgcatcgtgcagcggttgtgggaactcatagttaccagtgtaggtcacgccgaaagtcggcaccacgccgatggtgttttcgtcacaggcttcaatcatgcgtttcgggtccataaacaactgaccggggcgcatagggatctcacgcagctccacatcccagtagcgggcgaatttatgccagcagatttgtaccggaccgcacaccaggtttggtttatccgttggtttgcctgcagcttccatacgcttgcgccaacgccatttcatcgccatcccgccgagcatacaggcctcggaagaaccaatggtgttggtgccaacggcctgaccatttttcggcgcaggcgcatgccacagatcggcaaccatatttacgcaacgcaggtcgatggctgcggattgcggatattcttctttgtcgatccagtttttgttaatggataaatccatcaatttgtggacattttcgtcgtcccaggtctggcagaaagtggccaggttctgacgagcgttgccatcaagatataattcgtcattgataatctggaatgcgacatcgtcgcgcatttcgtgcagcggaaaacgtttactttctgcgatagtggaaatagacttcgcaccaaaacgactatcgagtagttcgctccttaaatccgttacttgcttcttatccattttaaactccttaaaatgattggatcgcattaaaaaagtaggatttatcgataaagtaagcaagtgcaaaggactcgtgtttaaataacaaaatcctaatgttatttatcgtgagatattacgcgaataatattttttcattgaaaaacaatacaatatgaaattcttgggtggtggtaaggtgttttatgctgttatttttatgcgcattctgtgtctcctgaattatcacgtaaaaatcagaccttaaaatatcactattagtacttgattattattttgaacgcatttataaaattattacataaaaatagcgaatattgctaaaatccccgccaacgatgtgttgacggggctgttattattttggcaataatactccggtataagtatttaccggatgagaaagatattgtttaacggcagtgttaacattctctaccgtcatttgtttcaacaattgctcctgctcagtccatgctgcaggatcgtcatattgaataagactatttacaatagtgttcgctaattgttgaacgctacgctgttggatatcgaggctgcgctgaacgttttgctggtattcattcagttcttgctcactgatccctttagccagacgcttaaccatcacttcattcgctaacgttaacagttcatcatgtcgttctggttgacaagtaaaagccagcaaatgactgatatctttggcctgaggatcaacgctgaggcgagaagaaacgctgtatgctccagatgcctgttcacgaatattaacacgtagatcttttgccagtgcgacgttaaaagcatcgagcgccatacgcgtcggcagattaacaggtgtccgggaatcataacgcttccactgactaacctgtgccacaggttcattttgttcttttacagtaacgcttgcgttgtccgtcgcgcgagttaatggtttacctgcggctaatgggctatcagagtgtttgatacttcctaagtaacgcgtaattaacgccacgagtttgtcttctgcgacattaccgacaatgacaaacgtgatatccgctggagaactaaacaattggcgatcggcagccagcgcatctgcggcagtaaactgtgcaatctgattttcttgcagtaatttcgtgcggtcatcagcatagcgcgtctcatacatctgctgggcgaatttctccgctggacgctggtcgagcgttttcaacgcctgaatttgagcattttgtaggcttgcccaaatattatcgttaatcgtgctgtgggtgattcgctggttaatcaactgaaaaccaggttcagggttattagtccgcgcgctaacggagagcaacgtattcatgccactgactttactgctcatggttacgctattttccgcactccagcgtttcaggctggaagaggagagttcgccaacgccgcttccgctaactgctttatttgccagcgcgataagacttttttgctgcgcagggaaacttaaatcgcctttattgcttacggcaataatttgtagcttttgctcttcacccgcggattttgccagaataaccctggcaccattggaaagtgttaaacttgtcagattctccgccagcgtttctttgctgctaatttccgcctgtgggtctgcgtctactgttaagcttaaatttctgcctgggaagacgtaagccgccagctttttgttggcgtactccttttccagcgccaggatagccgcaggagacaatgcttttttggcggcaacctcattgtttaccatttgctcccaaaatgcgtcctggttctttcttaactgctgccatttttccgccagactttgcacggtaatttgctgccacagacgtttgctaagttgatatgtctcttccgggctcaagaacggcgtattatttaaactgctggatgccaggcgactggtcagcatacgtaaatcacgttcagcttgctgatcaaccgcatttttcagccaggtgaggcgggtagatttgacatcatcgagttcttcagcagaaaaaccatgctgatcaatggttgccaactctgccattaatgcattcgcagcatcctgcatattatcgtctcgtgcatttacacggaaaaacaggctctgataatcgggtgcaattttaacgctgcgcgcagtgccgccagaaatagtcttcaactcgccgctctgtatgcgttcctgcagacgttgattgaacagctgaactaacatgctccattcagcttgttcgataaagctttgctcatcgttcacttgtaccattggcaggcgataatagagtgcgatgccgttcacccggttttctttatcattaatgatattaaagcgcaggtggttttcggcttttgtcggccagacgcgattttcagctgctttgttagccggaagcttacttaaattatcctttatcagcgccagcgcttctttactgtcgatatcgccgaccacgataaaggtcatattatttggttgataccagcgttgataaaattggcgcaattgtgccggtgtgaccgtggcgacagtatccatcaggccgataggttcacggtctaaattacgggtatttgccagcaggaaagggcggcgcgcctgagaggtgcgccatttcgcatcctgatgggcacgccattcctcagtaattacgccacgttcagcgtctacttcgagtttttcaaaggttgcggcattactccattcactgaagattgccatcacttgttgcagattttgtttctgcgtagtcggcaaactcacctgatacaccgtttcgtcatagctggtataggcattaacatcgcgaccaaaacgcaggcccatactctcaaatgtttcgatgactttattacccggccatgtttttgtgccgttaaacatcatatgttctacaaaatgagccacgccgagctcattgtcttcttcctgcaaactaccggtatgaatttgcagccataaatttacctgatcctttggatgagcatgcggataaatcatatatcgcaagccattgtccagttgcccggtaattaacttttcatcctgcggtaaggcggcggcaatcagccgcccggggagcaacagagttgccactaacgtcagtaagaaacagaggtttctcataattatctccatgcgaaaaccgggcgaatttacccggttaagtaaaatccgaactattaaaatttcatgctgacatcaagccagaaagtacggccactggcgtaggtcgccacaccggtgttcgttgtatcaacagcggttttgctatccagtacattgagaatatcggcactgatcgtcaggttttgttgttgcagaaattgtggcgtccaggacaagcgggtgtcccaggtcaggctgctatccagtttttcgtcaacatactgcttgtaatcactatattcgctgatgtattgcgcatttgtcttaccaaggataatgcgagctttacgcgcttcttgccaggccagcgtattcgcccacactaacccgctcggttgatgcgtgaaatccatgtttaaggagatctttaatgggttattaaaatctgccactggaacgctatcgtaagagaccagattaccgttataaaccacctggttatcaccggtattgctctcctcataaccattgtttaagctcaagttgcccttgctcttgatatagctaaagacaatttgtgggttaatatctacctggcggatatgcaggggttcggccagttcaaaactgaggctgaagctatgcgttttggttttgccatcgttgttatattcagtaatggtggttttagtcgcgctgtcggtacgactgcttttgctgatttgatcatgcgcttcacggtaaacatagtttgcacgcgcaataacgttcttaccgattttctgctgcaatcccattgccagttcatcgttataaggcgttttcaaatcctgataacgcgtcagagttttattaccacttacgctttccgtccagctattgcggatatcacgtaatcccatatcaagaatattcccgccatagtaacggttataacctgctgtaatcatactggtttgattagcaaaaatatcccattccgtcataaagcgcggggagatattgtggttactcagatagttgtcatagtcataccgcacgccgggcattaaactcacattacgccagctaatgcgatccgccatatacagcgtgtagttgtcaattcccaggcggcctttacctttatggtaaatggtatggttagttttctttccggcagcattaatcacataggattcagactggttatggcgttcagtccacgcatcggaatagatgtattccgcgccgaagtagggttgatggctaacattacccacggcgaatttttgccagtccaggcgtgttttgaaggtgtaattatctacagcctgggaaatgtgtcctaatccgccacgggtgcaacgccctgtaatatcaccatatgtacaactaagttcggtgtaccagatgtcatgatcgtgacgggtataatcactaatatgatcccaaccaacggtggtacgcagtttggcccatgcgagctgcgtatccatatcccatgccagaccataggatttattacccatttcgcgatcagactgcgggaaggtgctggtattataatcacggctggagccggtatattttaaggttaaatcgtgggtaaagcggtcgctggcaaaccaggtaaatttgcttaatgcagtatcgataacgtttttatactgtgcccgaccggcgacaatgccgtcattgctaacataatccgcgcgggtgatatcagactggcggcggcttaaaccggcggtaacgccgaagttatcagcgagttcctgattaaagctcaaggtataaaagttctttttaaaatctggggagtaataagtacttccactagagccttgattaaatgcgctcttgttattctcatcgatatggcttgttaaccagtcgctacgcgtagtgcgataacccaatttcaccttgctatcatcagcgttgaagcgtttgatctttgcatcaattaccccgccattgaagcgaccaaattcaaccggcacaaaactgtcataaagcgtcacattgtccagtaagctgacatcaagataatacccctgactcatcccgctaatattggttgcactactggcatcggactcattcgctgggttcaggttattagttgcactaataccgtcaatcaaataggcattctggtaggggctcgcaccgtgaatagagattttctcagggcgaatatctccctggttcaagctggtactttgcgtactatccatgcgtaccgcagggttggttctcagcagatcgctgatattgccattcccggtcggtaaacgctcgatgctttcactggtgtaatgcgtgttgccgtttacgggtacagggacaggagcatagaccgtcatctcttcaaaaaaatgcatgtacatgtttttgtcatcgacggcctgcgccacatcagcgccacataaaatgacgccaggaataagaactcgcttcatttatttatatctccgtacagcagggcttttattgtttttataaaaccgcgctaatgtcacaaatatcatcggccaggttccagacaccgggttgatgtgtaaccataatgacgccgcttgtgggtagtttttcacgcactaaacgcagtaagcggatagcctcttgttcctcaagatgagaggtagtttcgtcaagaaatatccatttcggacgtcgtaaaattaatcgtgccagggcgatacgttgtttttcgccgctggaaagaatatctccccagcgatcgtggtcatgaatacgcgcagccaatttcccaagaccaacctgatgcagtacttcgctcaagcttttatcgtctacgggcaggggaagtgctttacaaataatctctttcagtaagccggttttgattaacggtgtttgactcacataccaactgtcagcaggagaagaaatatcacctttaaaccacggccagcagtgggataatgttttaagcagtgtggtttttcccgcgccagagtagcctttcagtaatagccatttgcctgggctaacatgaaagttcaggttctctaatatgatcttattatcaggcgtacgaatactcgcatcagccacttgtaccgcatgttggcaatttttaggcttattcgtagggcgctgttcagtgagttgatggaactcatacaagcgatcgataaccgcagccagttcagcaagttcgtcatatttataaataaaccagcttaaattgttgcttaccagcataaatgcctggcggcttttcatcagtccgcccagattgatctgcccgctaataaactgcggcaataacagaaagtagggaagaacgctaaggctgcggctataaatattctgccagtaatcaagccaccgctgacgattcattaaacgatgccagttctctttaatggtatgaaaattgtcgctcaactcctggcgttgtagagactcagcattgcttagcgcaatcagttctgcctgcttattatgctgcacaagatttgttcgaaatgtcgcttcgctacgttgtttttccacattaagcggacgaatacgtttacccaccttatgggtaaataaagttccaccgatcacaatgagcacgacggtatagaccatatacccctggatattccattctgttccaccaacagtgaaactgagcgtacccgcgctttcccaaagaataacggtaaaggtgatcagcatgctaagactctggatgaagccaaaactaagactgagcgttttgctgatcagtaagagaatgtcttcagcgatacgttggtcagggttatctgtatttttatgctcgccgtagatctgcgtgaagtagtagtttttatctgcaaaccaccgattaaggtagtaatctgttaaccattcgcgccagcgaatagtcagtagtttaattaaccatgttttgtttacggatattaatacaaagatccccagcagggcagggaaccaaaggacaagctgccaaagcttatcggtttctttctggcttagcgcattgaaaaaatcattattccagtcgtttaaccagacctgaattttaaccacgccaaggatcatggcgaggataataatgattaacaacacactagttttattattcttacgcagccaaaagggcttcaacagacagagatactttgctatcaacatacgaagcgtaatgggaatggttatcattagcgaaaattgattgtgccatccaatgattatctatggcaatgatttactgatgaaatttatttaagtatcatttaacaatatgaaatataaaggaatatttcattttcagtggttatggttatgctattgataatcaaggatattgctaatgccctgatgcataccacgtaagccaggattttcgcaagggaagatgatgatgacgaaacacccgacaggaatttatgtcgggtgccttgttaaggtcataagaaggaggctaagaatggagttaaaagagagcgttattaattattctccatttgttttgcaacatccataatgtggtaaagcggtactctgttcttagctaactctaccatggcgttcatataaggtaccatggtactaaaaaggattttataaccttcgcaaaaataagaaacagtctcattgtttactttagtaatacgatgcttaggacaaccgccattgcagataggtttatatgcacattgctgacatttcgctggaatccgttttttttgcgctgtcagttgtacactgttcatcgttttgagttcagatttattaatgtttccaattttgtactgtggatagacaaaatggtcgcattcgtaaatgtctccattactttcaacaaccagattatccttgcaggactcctggaaaatacaactggtatgcccattccccaaaaaacggctgacaaagctttcaaactgacggatgaaaatttcacccacatcgtttttaacccattgcataaaaatggtactcataaacttgccataagccgtgggaggcacagaaaaatcaatgatacggaatgtgttctcactatgaccactgaaatcaatattcggcgtcccggtttctagcaattcgataaattgcatatgtttactgccgatagattttaaaaaatgataaacctcaagagggtaatggacattaacgttattaatgacggttaacgtattaaactctacttgataacttttcagacgctcgatggctgctatcacttttgcaaaagtaccgttaccactattactgcgtctgtaacggtcatgtaactcctgggggccatcgatgctgataccaaccagaaattcatgttctttgagaaaggcacaccattcattattcaataaaatgccattcgtttgtaatgcattaaaaatacgtttttggcctgcatagcgttgttgatagtgaataactttacggaaaaaatccaggccagccagagtgggttcaccgccttgccaggtaaaatagacctgattgccagacgctgcgatatattgtttgatgaactctttcagagtgctgtcatccatccatttttcatgagtaaactggctctctttttcaaggtaaaaacagtaatcacatttgagattacattgaaaactggagggcttggctgtaacgtgcatcgctatctcgctcaataaggcggcggaaaaatccgccgcatgaaggtttagttatttcgcttcgcttagtgctttcttgatattgttaaacttctcctgatttacctcgctaagcggtggctggctgctgtcgataaactctcttaccacgccttgcatctctttaacgacctgcggattggcggcggcaaggttatctttttgctgtagatccgtcagtttgtagagacctaactgattgttttctactgtatagacaaggctataatcgttatttctcaccgtataagagaattggcttaagtcctcagtgttggggttatgcgggtaatcgtcactctgatggcgaacaaatttgtggtaattatcccagaatggaatattttcctcgtcaaaccagtgagaataagaggttatccaggtcagatttttatgtggctcgccttgtttcttatcttgcaaccagggcagcaaggaaacgccatccagcttaaggtcttttggaatgctgatatcggctgcatcaagagctgtcgggtagaaatccattgcggaaatcagcttgtcataattaccgggttgaagttttcctttccaccacataaacattggggtgtgagtaccgccaggataggtctgactcttatagcctttttgcgccccgttcagcggcagaggaccatcgataaccgcaccattatcggaggtaaagagaataattgtattgtcatactgtccgtttttcttcagttgttcgagaatgcgttttacaccctgatcaacagaataaacggaagcgtagtagttatctgctgtttgactaccggtattaaattgcttctgatattgatccggtgcaggattatcatttggcaggtgcggagcattataagccaggtaaagcataaaaggctggtcaagtgttttggcacgatcaacaacgccaattgcctcatcggttaactgatcgctgatataaccttttgcggggacacgttcacgatttttgaacagactaggggagttgtaatatgccgttcctgcagcgtggaatcccataaagtaatcaaagccacggttttgaggttgccattcttccgcagaaaatgtggtgaagttgtcatgatagtcacgcgtttgtttatcttccggtaccggcacattactgattttactcaagtgccatttacctactgctgcagtgtaataaccatgattctggaataattcaggcaagaaagtttctgttagcggaataccatcctgagcatcggtattggaatagacaccaaagcgggcgggagctcgaccggtcattattgcggcgcgggaggggccggaaacaccgtgtgccacatagccgttagtaaaacgtacgccttcatccattaaactaaggagcgtcggcgtacttttttgtgcagcttcaatggctttatctatccctattttgtaggtatcgacaacttcacgattttccattgtttttgggtcaaaagatcccttatcaaaaggaagttgtccataaccaagatcatccatggtcagtacgataatatttggctttcctttggtactgtattctgtcggcgtaaagtcactgaaagcaacgtttgttttggttgctttcagctttacatcatctgccgcatgagcagcaaatgcagccataccagatgccagtatcaaagatatgctggtacttacgacacttttctttaatgcagacttcataaatgttcctcttcttattgtacttaattccaaagtaattttacgaagagaaataagtggatgtaagtgaagttagtcacataaagagatagcagatttagctaaaaaaagggaaaaaacagtccataaagcgttgacattactttctgttctattaagtaatttctcgccgataaacaactaatttattgatatttaataaattattgcattttactgacaaaatgcagaattgagatcataaataatcatgcaacaggttatgcaagtgcataaatatgtgatggatgtcacttatttatttcaataaatatatcgcctaaaaacaacgcggggcagggaatggctgccccatttaattcttacgcagcgtgtgtggttgactactcgttagcaaataatcaaatagctaaagcattcatcgtgttgcccgtattcatacccgtgtgactttgacaacggtactccttagaaactctcttcggactgttgccgaaatgtttgcggaacgcataaataaaataagatgtactggcataaccacattgttcggcaattttattgacactaccttctacgcgtatcaaattttttgcgtgctgcattcttgcatctaaaagaatctgactgaatgtcgtttgctcttgcttaagttttttcttcaacaggctttcactgatgtacaggcagtcacaaatatctttcagcttccatgggtgcgccggcttcatgttgacaatatttctcactttcccagaaacggatagcacaccgttagttaatagtgtaatgaaacctttgcatgcggcaaaaatagacaggcaagaaaaaagcaaaagttcactaaaattatgatgattgcgttcttcgctgttgagataagcaatcatttcattaagcaatccagtcggtacattactagcacgtaaaaacttcgcaggaacaggcaccgtcactgtctggatgttagtgcattgtagatattttttaatggtattttcagtaaatccgatctctttaaaatgccgctcataaggttcaaaatgcgtacgaacagcgttatctaccatcaggatctcgccgtcagagaaggcgtaatctttatctaaaatgttagcgttgaaggcatgatgaataaatataacagaacaaacgaggctcattttatctccttaaaacaataaagtttttatcgatacttttttaacatttcatatttataatttgctgtttgttttcagccttgcaaactattgataatgaaatgtgtaagatctcttgcaatgcgacccatttctgaaatactcagctgatcaattgccgaaaaaatggctatcaacgtaagtgtcagtaataagacaaccacaattgcagacatgatttctttatagttgtctctttgcgtgattttgtttttcactgtggtcgcatgcatttcaaatatgtttatttagcggataacgttaaaaatcgttaatcagtatgcttaatataacaggctggagaaaagaggaaataggactggtgcttcagtactgagcggagtttcttacagctgtaggcagaagtttatatcttatagtatgtagtttaatttaatccatgtgagcaaattgcgaaataatagtcaatgaggaattcttctgctgtgcggatgacagcagaagaaatgagaagaggcattaattacttggttctaattcaaccggaatacttttatagccaggaatgccacttaatggatcgtggttatcaagtgttagcatgtgattgctttctggaaaataggtcaccagactgcggtcagccatagggtaaatgaccacttttaatctatccatgcggcgactgctgcgcttaccgtctggcgtaagcgcaataagattaactctttcgccgttttttacacggcaaattttagcttgtttagcactcataaagaccacatctcgttgaccgaatacccctcgatagcgatcatccataccataaatcgtcgtgttgtactgatcgtggctgcgtactgtcgccatgaccagcttactgttaaacgcactagagggatcttctaacagccctttgctggtaatgaaattagccttaccactcggcgtcatccagcgcctttcagcagctgcatttatcaggtgaaaaccaccgggatgacggatgcgctggttatagtcggcgaactctggcagcacagcttcaatgtcattgcgaatgcgatcataatcttccaccagatactcccaggctaccacgctctggggtagtgctgcctgcgcgattcccgcgaccactgcacactcacttttcagcattacaccggcgggttttaacacgccacggctggcatgaatcatgctcatactatcctcaacggttaccgcctgcgcaccgtttttttgcatgtcaatctcgctacgtcccaggaccggcagaatatagctatgccgtgcggtcaacagatgagagcggttaagcttagtggctacgtgtaccgccaaatctaattgcgttaacggtacagcgctcgcttcccgatctggcattgccagcgcaaaattgccccccatgcagatcaatgctcgagcctgccccgtacatattgcttgcatgctggcaattgcagcatgtccaggtgcatgaggtggggtgaagccatagcgctcacccagacgagccagaaactctgcagacggtttctcggtgataccgacggttcggtcgccctgtacattagagtgtccacgtagtgggcagatacccgcaccaggcttgccaatgttacctttcatcaacagcagattgaccagttgctgtacgttctgggtaccatgttcgtgctgagtgatccccattccgtaacagataatggtgcgttcggcagcggcatatgcgtcagccagttcggcgatttgtgtctgacttagtccagaaatacgttcgatatctttccactcggaattgagaacgtcacggcgtagctcgtcaaagccgacggtatgcgtttgaataaactcgtcatcaagcaaactaggccgacctgcggcgcttgcagcatcatcgcgctcaattaacaggcgcatcatccccttgagcaacgccatatcgccaccaatgcgcacgttatagtaggcactggccaactgagtctcagagttcgtcagcatttcaaacgggttttgcggtgcggtaaatcgctccaggccacgttcctgtagaggattgatggcgatcattttcgctccccgtttcactaaagcgcgcaagctagtcagcatgcgagggtggtttgtaccagggttatgcccaatgcaaatgactaaatcgcacttctcaaagtcttccagcaacacggtccctttacctacaccgatactcgctgccaaacccacgcttgtcggttcatggcacatgttggagcagtcgggaaagttattgctcccgtattcacgggcaaaaagctgataaagaaaggcagcttcattggaagtgcggccgctagtatagaattcaacctgattgggatcactatagctttgaaggcgtgcgccaatttcgtcgaaagcttgttgccagcttaatggcttgtaacagtcgctgacggcatcatatttcaaaggctgagtgagtcgccccgcagcctcaagctcgtggtctccccaggtaagtaaactttgaaccgtattctcagcaaagaaagaggcgtttacctgcttatccgtgacttcccaggcgattgcttttgcgccgttttcacaaatgtcgaaactcgcactgtgcttaggatctggccatgcacaacccggacagtcaaagccctctggcttattcatgtcaaacatggcaataacatcctggcgtatatccatctgcttacgtactgcattcgctacggatttaacagcaccccaaccacctgcagcaccctggtaggattcaatttttttcttcatctacttatcctgtgtggaaatgaattattaggatttgtaatagcgatgatgcacagtacatacaaagggattatcgccaacatggatatataagagtaggggactactctctttctatttttaatctattatcgttaaacaatagattaaatacgataagttaagcatcatctctcatagtgtttaaattaacatatttttcaatataaaaaataagactctggcttcaattgtgcgcggattttcttacaggtgtaggctaatagccttcacaaaataattatccgcgcaattttcgtgaatggagcgcatagactaaggtcaaaatcacaattattcatagataaaagtgacaccaatgacactctggacggttccggcactaaccttgtttcctgtttgtccataggttgcgcttaaacccagaggtactttgcttttatttactgtccccagggagacattttctcccgtagccagtatttttccattacgcattagagtgacacccactccgcttgcttttgttgcatcaggtgctgtgttagcaaacacttgtcggctactgtcagtggtggcaccgctaagataaaaactgagcttttgttcgctactgcaatatacgccaaggggtatttctgcgcttccaggaaagtccgggagatccacggtgacatttcgactatcaacggtgcagccgcctgttggcataacaacattgttattactaataatattccacgtaaaattacgcggatttccgcttcctaatgttgcaattttatacatatgaatacgggcaatgacttcccccgcttttatgacaactccaccggccgccccaactggggtaatatagagttttaacggtaatggcatcggtgtcttatcaccaatatccaatacgttggtatttgtcgtcaacgggaaggggtaggtcacattattccagtacaggcttcctttataactctgtagggagcctgcgaaagcactgccttgtaccaggtttatatgatcagtgtcgtaccagccgccgtaatcattccagcaacttatatgctgagacaagtctacaaccagattctggcccggctgtattacagggtcgagattaacataaacagaggttgtacctgctccaatactactcccgccatcgacattacaactgaaggcaaaaactttgcctgccattaatagaagataaataccgaacaggacctttatactgattgttttacccatgatatatcctaaggttaaaaattgatttaaaaagaaggctaagaaaatcgaatcgacgttattgccaggtgtagatcacattgattagcgcctcgatcgttccctggcttgcgtttccattcaccgtgatagctcttgccttaagtggaaactgtgcattacgagtgatctcatcaacaataaccgttttgctatcgccattttttaacgcagcatcctggtcatccctcagctctatctgaatattttcggcagtaccttcatttttgtaataacccgtattgtcagtactacctgtcacgattgccgtcactgcacttgtttcaaccggacaatcggttaaactcaaagtaatattgtgccagccagatgcagaaccaggttgttgcagattgcgcgtataaagatccccgagattaacgttagcttctttggtttgaatagtgcagggtttagcgactacccgaccattaacagtgatagtgacatcggcggcctggagagttgctgtgaataacgcgcaaaacgtagctaacaggaacctcttgtgaagtcttttcatatctgactctgattattgaaattcaagggtaaaggttgcgctagccctcaccagtcccggattgacggacttctgagtactcttcagacgagcggagtaaggcaaaatattgttctgttctggtaccagtgggatccactgcatcccggcatgaagatcattcagtttcaccggacgcatatttgcgtccaatatttctatacccaaaccggaggccgtattgcttccttcatccagtttcaacaaagtattattttctgcatcctcaataccgttaaatgcaacccgaacccccgttgtccctttgctgcattcacttaacgtaatctgaaaagggacggctggacttgtgctaccggtcgttggaaattgtctggcactgtttttttggagatctacggtaaaattaaggctatcgctactgactgtgcagccataatcgaggacgcgcccgctaattttaataacgctatctgcggataaagcagaataggtggttaaccccagacataaaccgaggaaaataatgttattgtatttcataatctattgttccttagcgacagattgctgtctgctggttcagtaaggtaccaggagaaacttcaggaagcttgtactcgacaatacagttactgtttttatctttgccccaactaacctgtaattgcccactctgtggaagtccagtcagataaacctgaccattttccgcgacaatgctgccatttttattctctccgtgtgtgacaattgcaccgaatggaacgctcttattaccgtacttcaacgtcattaatactttcccgccgatttgtgcattaaatgttgctctggcaatagcaccgtgagttgggatgacagtgaccacggtttcatccagttcaacattatctgcaagggaattcgcgttaagagcaacacggttttctctatattctgtcgcaaatggtaatatggcatagccacgccagtcggtatgaattccggtctggttctctattttgacattatcagcaccaggagccttaaccagaaccattgtgtcgcccagcggctgtccaaaggtgatgccatcagcatgagcaataatcccaccactcattccgtaataaatctggctgctgtcaccactccgactgtaaccgacattagtattaccataagctccacgataattaagagaactgtaaccactggtgccagagcttgtattacctccgtgggtgttaccgacctgaacgctataattcaggttattatccggcagcagagtgccataaaccccgcttagattggtcatgccgcctttcaaatcgttactcatactgtaactggcgttactattacgaaatgcgctctgactgtctgtacgcatccaatgactgaagggaacattaagcgtaaaagcgagtaaatgatcccgatcgttttgccatatattattggaatagctgtaattcaggctagtcgtaatatcaccaaacggcacatttaatccaaaacttatttgctggtcgctgcgactcgtgttccagtaactttggcgactggcactgaaaaatgtcgtaccgtaatttccaagctgctgagagatgcttatttgttcctgaccacgcttactgtagaacagattaaaataatcaataaattgtgtctgctcattggtgtctccggtaggaggcttgacggtgtaaccactcattcgactgtaggcactgtcggataagttataaaaaccttgcgtagaatagcgatatcctgcgacctggatattggttccacaacaagtttattgctgcacttgttgaagagagtatttgcaaaaacattttatgtcgctaaataacatgacgatttcattatgcatgttatttataaaccgtgactaaacagaatattattgcgaacaagggaagtgtcaggaaaggtcaagagctaccaatggttaatatggctataaatcattagctatggttaatgtttgcttgctgaaactaacaccgaattgctctaaacagataagtgcagggtttattaaagctgtccgacagactttcttaacctggtaatatctctcttgggtgactctccaaacatccgcgaatattcccgacactaatgggatagctttcgtaaccgacagcataggctgctgtggtgacatcgtaatgttcattcagcatctgtcgcctgacttcattgagacgtagccatttctgataccggagtggactcattcccgcttgatccgtccttaaataagtaacagcaccctctggtgttttcgtatgcagtgtctatgcgacagacactgcgctcttagcatggggcagggaataaccaggctatttctccatgcacaggccaattatgaaagaggagaggcttaagttcttgaaccctgaacgaataacgactaccagaaaagcacttcgcatcactcagacatgatttaacataatatacattatgcgcaccaatataaaccaaggaagaatccagtcgttggcggtcatgattgtcatgctcattaacaatgaccaaaccccatatctcacttactaccgtattctcggcttaaccgtccatgcaacctcaacacattgctttcaactgccgtcaccacgttctccggaaaatctgtcggtaaactagtcttcacgttatccagtgctgctggaatcattctggcaaagtcactcaggatttcatgcatctgcacttccgggaatctcagcacctttgctgtcgccaaaaaatgtcgcggataaattttatcgattgccgtttttttgcctttggatgcgttaagccccattgccagtttgagatcgctgatgtgtattcccgtaccgccaaggaccggaaatgcactaatgatgtcgtaaaatggcgtgagtcgataactgccgccagcctgaataaatacggagaagttttttgcatgaccgtccgttgcgccaatcaaccactggaagacctggaatttcataaaatcatagcgatctttcagcgcctcgctggaccccatcaaaaaagccatgatccgcgcgatgcctgggcctccatcactttcatatttcacgctactaggtaaaccgaatgtctgacacatatcctcctgtggcaagcgaagtaaaaccgttcgctcagcattccaacgcctgtcaaaacgttcgaccgctaacgcgcgcacatttcccgctttaatgatttctgcgtccggaacattcaacccaagttctttcgccagcagcagacagtaatactcattatcaacgctttggctgagatcgagcgtcgcattgggctgcctgatttcgccaatcggtaatttaatgatgtgcgtcgtcggcgttattcctttcggaatgcaccagtcattgcctattctgagcagtgctgtcttctcctgtgcgccagcaacgctgatgcgaaagtcattttcttctctaatcatgcctagcgggatatctgctttataagccgttaatacttcttcaagtctggcttcagtaagcttttcccatgccattatcggatgcgttacggtttcgtcttcgggtattaacgtcacggcaccaacgctgtctcgccctatttcactcaataaatcaaacggttgtctggatttggcatgataacgtttaacgatccggtcacgtacaatcgggctatcgggtaacaggttatcgaagaagttaaatacggcatcagaggtgatattccccctctgcaatggcaggctaagactcaacggtctggcataacggcttgctaaccactccggtgcatacttaaaggtgtgcgcgccgttggctaacttcgttaactcgcctacccgctggttgttcatccaagtgacaagtttaggcattaccactccagattttgctgttctgtactttctgggctggcatttttcgcgtcgcatagcgtcatactgagttcaaggctctgtaaaatcttaaaaaatgtcgtgagcgtggtattgtcagggttgttttcgaaattggaaatcgtcgcctgcttaataccaatttttttcgccagctcgctctgcgtccagccattttgctggcgaaccagtttcattgcattcgccaattgcgttgggctatagatcttctgaaagctcatcatgtcatacgtccacagcaagtttatccgcttaaggggatattataagttttatcctttagtgaggataagtcaatctggaaacacatcttatccgctctacgggataaacgctgcgatatccgcgatcgcggataaaaaggaggatttaaataaggcgttgatgcgccgtttgaagtcggcaatattaagccgcatgccatctcgacatgcggcttatacggtttaccagctatatttcactcccagcatgccctgagtatcgctatagcctttatcacctagttgcacaccgacattcccccacaggctaaggttgttatttactttcgcctcaaccccggtacgtacttcaccgagattacgcgcaccttcacggcctacggtttgaccattcatcttcacggcgtagactttgctattgttgatccagttcgcttcaatgtaaggctggaactcacgctgtttaccatcgtcacgctggtgatggctgttcaggtaggttttcaccccaagtcgcgtttgcacatttccgtcgccttccgtttcaatgcgcgttccgtctttccgggtatggtcggaatctttcacacccatccaggtgatttgcgcctgtggctggacgtaccaggtattcagcgtcccttcgctgccgctaaatgttcccgcttcaaaggtatacccaccctcaacagaggccgtcacaccgcgagaatcatagtcgtcagcagaacggttatcggaactgacgctgttatcaaaccagttatacagcgcccagctgtcaacataagcgccggtcttattcgcatcgttctgataccaggtcgcgtacagcccagcgctgtaaccgctgatgcgcccatcgcttttataacccacacgattactctgagtattactgtgctgattggcgtagcctgccatcacgccaagatgccagcgatcctgcgcgttgctactccactgcgccaaatcgccgcctagctgcaatacatagcggttagcctgagtatttagctgaccgtcaccggccctactacgttcgtgccctccgacatgacgcatccacatactgcttgcgctcccctgagaatgcagactatctgtatactgcggctcacccagacggtcgtgtaaacgatggctaaacaggctgttggctgcggcaatgttgctgatatagcttccggcctccgggcgataaacacttgggccttccggatccacaacagggggattattgatgggatcgggtgtatccgctggcgttacgccgtcccatttactggtcagataccagtttttctcgtcattccccttccctttagccagcgtgtagacgtaagccccagcttcgacagttccggtggtcagcgcgaagttacctgcagaattaccgccaacctcaatgagttcaataccgttgaccgtttgtgcaccgacgccgccaatgttatcaacccgaacgcgagtgttcccttgggtatcgcctttcacgttcatcttatcggtggggctattatcgccgcccagcgtcgcgttgaacgtcatcaggccattgtttccggtatagttgccgttaacggtcagtacattccccggtttccccccttcgctattcatttgaaccgtgccgccattctccaggttgccgccgatagtggttttagcgacacgcagtgccccccccaggcataacgttcatatcacctgcagtggtgacatttccgctcatcacaccgctgttatggatattaatgtgttgacttgccatattaatggcagagtcggaaccgaaagcaatttccccccccacgatatccgtcgtaccctgatatgccgcggaatcgttgttaagagtcaggatcccggtacccagttttgtcacatcaccgctaccgctgatactgtgcgtcatcgcccagctacgctcagtggagatggtgagcaggccattattgataacggaagcatcacccaggtttttctgctcgttgacgctgagcgcgctgcctgtatcaatgttgaattgccccacaaagcggctattatcgccatccaactctacatctgtcctggcggttgcgctcacgatacccttcccgcttatgctattacgcagttcgccagtcacgttttttagcgttaacagaccgtcattggcaatatttcctctgcctaacccctgagtattatcgaggctgacttccgcatttgggctaatgctggttaacgcattgtagcgtgcattaagcccctcgatagccagcgttccccctgtaacattcaggtttccgccacctgtcagttcaccctgactgatcccacctttatttaccgtcagcgccccctctttgaacaaaacagtgctacccatctgcccggtgaatgtctctaccgtctgcgtgcttccattaagatcgacgatggccgcgttgctgatgttcagttcccgggtgttgccaagtgcaccatccgcatcggtacgtaatgtccccatctgaacgtaggttgccccctgatagtcgttctgaccgttggaaaggctaacctgtcgcaccgtattgattgccagatccccttcaccaccgatttttgcgctcatatcggccgttgcgccataggctccgccatgttcggctaacgtcagcttttgcccaccatggatgttcagcgctttcagcccatagttaacgtacaaaccattacctggtgcggtcgtgaggcggaatccataatcaccctcggcgaccaccgttccgttttgcgcaatgtgtaacgttttgtccgcttccacctcgtcgccctgtaaatcacgtaacgttaaactgccaccgctcccaataaccgtttgcgccttcaccagttgaacgccgacatggctatcgtcgtgttccagcaaattgagcgtcgtcagagggttattcgccatgggatcattccacggtttaggcacgtcgataagcacgtcgcccgtcccgtttacctgatagttacggcctttccaggtgtagtcacccgcgccgacaaccagcgtatcgacgctgatatatccctccgcgagcgtcgcagcaggaatatccgtatcgaaaatgatggtacctccattcatggccagtccaccaatggattgctctccaacttttacgcttgtggtattttcactgtcagactgcaacatcgcgtgagtaagcgcagcggtgttgtcgcgttccagagtgaaggtactgtctttcagttgggcaacaccggcgaattcagtccctgttgcatgggtaaagccaaacatcttgtcggaggaactcagctgcactcgcatcaagccatcgcctttgagcgcattggtcagcgtgtaatctcctgcactgttcgtacttgcgagaatgtcgagcgtaccggggtttgcaatggttacttcactgctccccatgcccgttaccccatctgccgtatgagacgcaatggtcaggaggccgtcattgaccagcgttttaccgctataagtattccctgcattgaacaccgtatggcctgcatcatggatcacttttccgtctttatcgtcacctgtaatcagcatatcgacctggtagccggcatcactgttattggtatgattaaagacaaaaacgccttcgccaagaccaaactccactttcgtcgcattggtgataaatccggcatctgccgccgcctcaccgtgagcagcaccaatgtttagcgttcctacagcaggctcaaaaacacctaagtaaacttctccaccttcgacattcagcgtaccgttattcgtcagggttaacgtacccgtaccagatgtccctacgtacatattgaatgtttcaagaagagagttctgcccatccaccctcacgtcgcccttacttttgtcattgagagctatctgtgtatcacgcgctttaactatacctccggtggtaatattcagttcacccgtgcctaatacaccgacctgtagcaattgtgcgttagtagaacttgtctttaaattccagagactgtccgtactaatattaactatccccttaccggaggcatttcctccgataaatccatagcccgtactattaagggtggcaccattactgacatttacgataccgctaccaaaattaccgacattgatacccacagtatcgaagctacttgtcgcatccatcaggttcagtgtgccgataccgcttgctttatcgcccaaaaaagtaatattttggcttacgaacttaccgccatcgctaatattgaggtttccgacgcccgcaacaccaatggtggtatagacattcttattgacctcccacattccccccgtggtgatgctgacattcccgacgccggtttctccataaccgagactacttcctccgttgctgacaacaagcccctgattactgatattcatttcgccgtggccgtcataaccaagattagttccgagattagtgataacggagttcttatccttaacagtaatgttgcctgtgcctgtttctttcatccccgcagtgataattccgctatctactttgccttcactgctgacattaagttcaccgtcgccagcatcaccgatatagatatagcggaaagcttcgcccgttccgaggaaattccaatgccctttatcggtcacgttgacgacaccgtgggaaccgtcctgaacgcccaccaaactatattctttgttattaatcagtccattattggaaatattgactgtgccattaccgaaatatccattatagagtctgcgtaccgtgatgacagagtcttgatcctgcacattcagggttccgataccggtggcattgccaccgataatcgtattttcagccgtaaccaaccccccctcgcgaatagtcgcctccccagttccttgattaccaatttgaaattcaatactggaatcattattttttattagccactcgccacccttttcaacgacaacctggccattactgcccgcctgatagcctaaaatggcgacgatactactcgtgacgtaacccttatccgtaatatttaaactacctgtgccatagctacctatttcgaataattcggtcgtcagaacagagtcctctccctcaacattgaccgtcccgacgcctcctgtgctagaacctaatcttaaatagcctccatcgacgtgacccttctgtttaatattcagcgtccccgttccggattgacccacatttaaaggccttgcattatttccgctatcatacaatcgccaggtgccacccaaaacattaacggtgccctcactgtcctcattagcgccaatgacgctggtagtaatagtggttaaggaggcattaccgccagccaaaatattaagcactccagtgccataccagccaaccaggtaggcatcataagcaacatcagtatcaatattggtaatctgatcattatcaacttccagacttgcaccagacgcactaccgcttagtgccagcaaaacacccagcgtcaatctactgaatttcgttgtcagtccagaggatttacgcaaattaaccgtgcttgttttacctgccctgcgagttaattcgctgcaggcctgaaatacctgtagagtgcaattccatatcacgcgatagattctattcatataaacgctccatatacaaacaatacagccacgaaagagatgagtcgtcagacattaaaaatgaaacttattaaattgtcagaggtctgtattgagtgttagttggaggtgggaaggtgtcaatttggctaatttgctaatgctttcgaattgatagattaaaaattgcatagttcttattttatttaaatatgaactatgagttattgttgcttaataagaaaactgtttctttcaataggaaaattatcatcatcatatttaacaaagaatagcactaattgctaaaaatcgaagtttattaaaccccttttgcatccattagtgtctttaggaatattcgctataaaataagggttgtgcttaatgctttaagaaaaatagcaattttcccttgaatatcgtactggtgatggaacgatgaatctgcaagctggcttttaacaagccagctctaaaagaagggaaataagaataactatactcaaaaactaacagccacggtcatcatgatgtggctgtcaatgaaattataacccaggcgctttccataagctcgtcgtcagtccatgatcaaccagccccagctgatcctgataaactgcctgccacttatcgcgactatcctgataaagttcatgcttttccgggtctggtgtgtgcgtccgttcccagcgaaccaggcgttctccggtttctgccatactactaaaaattccggcaccgacgccagctgcaatggcacatcctaatgcagtggcttctttgaccaccggaatattgacgggtaatccgctgacatcagcgagaatttgactccataatttccctttactacctccgcctgcaaagactaagctactaggatgaatattgctgaaatcagcaatttgctgcaagttacacgcacttacaatcgccgcattttcttccagcgcacggaacaatgtcgctttgttacatttatccgggtcaatggacaagttaataaaggaaggcgcagcgtgataccaggttttaaagcgcattctgtcggagaagatcggcattacgccccagctcccaggcggcacccgactggccatctcttccagcagcgtataggtgtcgatgcctaaacgttcggcaatcagtttttcttcggcacagaaagcatcgcggaaccagcgcatggtgagtccggtaaaaaagcttatagattcagcttgtaccatgccaggaataacatgaggattaacgcgcacgttcatttctgggtctgtcaccggcgcggctaaatttacaacttgctgccagaatgtgccgccaagaaccgcggtttgtgccggacgcacaacgcctaacccaaggcaaccaagctgcacgtcgcctcctccaacgaccaccggagtgcccgccttcagaccgcagagttccgccgcttgactacttaccacgcccagcaatgtgccggtttctttgacaggagaaagaatatcggcacgtaggccagccatatccagcaatgcaggtttccagtcacgggtggttagatcaagaagtcccgtggtgccagcgttagagggatccaccgccagttcgccgctgagcatataggccagccagtcgctgatcatggtgatggtacttgcctgacggtaaatatcggaacgatggtgcgccagccaaagtaatctggggatggcacttaaagccagtgtttgtccggtcgcgcgataaacttcgttttcaaaggtattgttgtgcagttctttaagttcgctaacttcgcgtgccgctctggcatccacattggcgcaggcccagatcggggctccttcattattatataaaacaatgccttcacgcatgctacatgcgctaacggcagcgatatactccggggctatgccggcgttgtgcagcgcctggcgcatacactcacacgccagttgccagtttttgttgagatcaaattccatagaaccaggaacgtccggtactgccagatgccgccactccgcctgtcccactgctatttgattgccttccaggtcgaatatcacagcccgaatacttccggtgcctgcatccagcgccatcaggtagtacttactttcactaagggtaaagagtcgagccattagattatcctcggcttatgcgttctgtctgttcctctatacgttctccatcattcccggtaataaggtcatgcaaatttaactacgtaaaatcgccgctgctgtgtcctgatcggtaaccagtgcgttgatataaccgcctttcattgcagcggcaattgcttcggctttattttctccccctgccacgccaacccggacgggtatggtcttcagcgcgcttaaaggtaagccaatcagttcgttatgtattttgatattcgtgacaacgtcaccttttgcatcaaaaaagtagcctaaaatgtcgccaaccgccccttttcggccaatcattaactgttcgccctggctgatataaccggagcgaatgattgtcgcatcgtcctgttgactcacagcaccaatgccgacaatcgccacatccgctgcttgcgcggctaacagaacatctttgacgcaattttcattttttagcgtacgggcaatgtcagcggaggatgcccgcaacggagccggaataatattcacactgcacgccgcgttaagctgcccgattcccgtcatataagaaccgacgccaccggagagcgtgaccaggcgaatttgctgactgctaataaaaccacttaagcgttgcagcgtattcatggttgcctcgccaaaaccaatcgccagcatctgttgtggttgaagtaaactcatcaacatatgcgccgcgcctatccccagtcgcccaccgacatcagcatccgcaagcccagggatcacccggacatgttgcaggctaaactgacgacgtaattgagtttcatattccagacagccttcaaagcgagaattaatctgtacgcgaataatgccggactgatgccctttctccagcaatcggctcactttcaaacgtgtcaggccgagacgatcgctgatctcgctctgggtcagcccgtcgtgatagtaaaaccacgcgatccgcgcgacctgttcttcttcacacattccctgttcactaattgcgctatcgttgattgtcataattcattcttcactttgaacatatttaaatctttaatgcaattgttcagttcttgctcatttatatctgtgatggcaaccacagtttgactctacgagcatgaacaaacgcaaccgtgaaaatcaaaatagcataaattgtgatctattcgtcggaaatatgtgcaatgtccacctaaggttatgaacaaattaaaagcagaaatacatttgttcaaaactcacctgcaaaactgaacgggggaaatatgcaaacgagtgatacccgcgcgttaccgctactttgcgcccgcagcgtttataaacagtatagtggggtcaatgtcctgaaaggcatcgattttacgttgcatcagggggaggtccacgccctgctcggcggcaatggtgccggtaaaagcacgttaatgaagattattgccggtattacccctgctgatagcggtacgctggagattgagggcaacaactacgtcagattaacgccagttcatgctcatcagctgggtatttatctcgttccccaggaaccgctgcttttcccaagcctgagcataaaagaaaacatcctgtttgggctggcaaaaaaacagctctccatgcagaaaatgaagaacttgctggcggcgctgggctgccagtttgatctgcatagtctggcaggaagcctggatgtcgccgatcgccaaatggtggaaatcctccgcgggctgatgcgcgacagccggattctgatcctcgatgaacctaccgccagccttacccctgcggaaaccgaacgcttgtttagtcgcttgcaagagctgcttgctactggcgtgggtattgtttttatcagccataagctgccggaaattcgccagattgccgatcgaattagcgtgatgcgcgacggaaccatcgccttaagcggcaaaaccagcgaactgtctaccgacgacattattcaggccatcaccccagcggtacgggaaaaaagcctctctgccagccaaaaattatggctggagttacctggtaaccgcccacaacatgccgccggaacgccggtgctgacactggaaaatctgaccggcgaaggtttcaggaatgtcagcctgacgctcaatgccggagaaattctgggcctggctgggctggtgggggccggacgcacagaactggccgagacgctctatggtctgcgtactttgcgtggcggacgcattatgctgaatggtaaagagatcaataaattatccactggagaacgtttactgcgcggtctggtttatctgccggaagatcgccagagttccggactgaatctcgatgctagcctggcctggaacgtctgcgcccttactcataaccttcgtggattctgggcgaaaaccgcgaaagataatgccaccctggaacgttatcgtcgggcgctgaatattaaattcaaccaaccggaacaagctgcacggacattatccggtggcaaccagcaaaaaatcctcattgccaaatgcttggaagctagcccgcaagtattgattgtcgatgagccgacgcgcggcgtggatgtcagcgcccgtaatgatatctaccagctgttgcgcagcatcgccgcacaaaatgtggctgtgctgcttatctcctccgacctggaagagatcgaactgatggcagatcgtgtgtatgtgatgcatcagggcgaaattacccactctgcactgaccgagcgcgatattaatgtcgagactattatgcgcgttgccttcggcgatagtcagcgtcaggaggcgagttgctgagctaaagtcagcgtcaggaggcgtcatgctgaagtttattcagaacaaccgtgaaatcacggcactgctggcggtggtgctgctgtttgtattacccggttttctcgaccgccagtatttaagtgtgcaaacgctgaccatggtttatagcagcgcgcaaatcctgatcctgctggcaatgggcgcgacgctggtaatgcttacgcgcaatattgatgttagtgtgggtagcattaccggaatgtgcgcggtgctgttggggatgttactgaacgcaggatatagtctacctgttgcttgtgtcgcgactttactgcttggtttgctcgcgggatttttcaacggtgtcctggtcgcgtggctaaagatccctgccattgttgccacccttggcacgttagggttgtacagaggcatcatgttgctgtggactggcggcaaatggattgaagggttacccgccgaactgaaacagctctccgccccgctgctgcttggcgttagtgcaattggttggttgacgataattctggtggcatttatggcctggctgctggcaaagacggcgtttggacgcagtttttatgccacgggcgataatttacagggcgctcgtcaactgggcgttcgtactgaagccattcgcattgtggcatttagcttgaacggctgcatggcggcactggcgggaattgtgtttgctagccagattggttttatccccaaccagaccggtaccgggctggagatgaaagcaattgcagcctgcgtgctgggcggcattagtttgctcggtggttccggtgcgatcattggtgcggtactcggcgcatggttcctgacgcagatcgatagcgtactggtgctgttgcgcattccggcatggtggaatgattttatcgcgggtctggttctgctggcggtgctggtgtttgatggacgcctgcgttgtgcgctggaacgtaatctacggcggcaaaaatatgcccgctttatgacgccaccgccatccgttaaacccgctagcagtggtaaaaaacgggaggccgcataatgcgtattcgctacggttgggaactggctcttgccgcactgctcgttattgagattgtcgcatttggtgcaattaacccgcgaatgttagatctcaatatgttgctgttcagcaccagtgactttatctgcattggcattgtcgccctaccgctaacgatggtgattgtcagtggcgggatcgatattagctttggtagcaccatcggcctctgcgccattgcattgggcgtactgtttcaaagtggtgtgccgatgccgctggcgatactcctgaccttactgctcggcgcattgtgcgggctgatcaacgccggattaattatctataccaaagttaacccgctggtgattacgcttggcacgctgtatctgtttgccggaagcgctctgctgctttccggtatggccggagcgacggggtacgaaggtattggtggattcccgatggcgtttacagatttcgctaacctggatgtgctgggactccccgttccgctgattatcttcctgatatgtctcctcgttttctggctctggctgcataaaacccatgccggacgtaatgtgtttttgattgggcaaagcccgcgcgtggcgctttatagcgcgattccagttaaccgtaccttatgtgcgctctatgccatgacggggctggcgtctgcggtcgccgctgtgctgctggtaagctattttggtagtgcacgttccgatctcggtgcgagctttctgatgcccgccatcaccgccgtggtgcttggcggggccaatatttatggtggttccggttccattatcggcaccgccattgcggttttattagtgggatatttgcaacaaggtttgcaaatggcaggagtgccaaatcaggtgtccagcgccctttccggtgcgctacttatcgtcgttgtcgtaggtcgttccgttagcctgcatcgccagcaaattaaagagtggctggcgcgtcgggccaataacccattgccataaaggatatcttcatgacacttcatcgctttaagaaaatcgccttacttagcgctcttggcattgccgcaatctctatgaatgtgcaggccgcagagcgtattgcatttattcccaaactggttggcgtgggattttttaccagcggtggcaacggcgcacaacaagcgggtaaagagctgggcgttgatgtgacctacgacgggccgacagaacccagtgtttctggtcaggtacagttgattaataacttcgtcaatcaaggttataacgccattatcgtttctgcggttagccctgatggcttgtgtccggcactgaaacgcgccatgcaacgtggtgtgagagtgctgacctgggactctgatactaaaccggagtgccgctcttactacattaatcagggaacgcccgcccagttaggaggtatgttggtggatatggcggcgcgtcaggtgaataaagacaaagccaaagtcgcgtttttctacagtagccccaccgttacggaccaaaaccagtgggtgaaagaagcgaaagcgaaaatcgccaaagagcatccaggctgggaaattgtcactacgcagtttggctataacgatgccactaaaagcttacaaaccgcagaaggaatattaaaagcgtatagcgatctcgacgccattatcgcccccgatgccaacgccctgcccgctgccgcacaagccgcagaaaacttgaaaaatgacaaagtagcgattgtcggattcagtacgccaaatgtgatgcgcccgtatgtagagcgcggcacggtgaaagaatttggcctgtgggatgtggttcagcaaggcaaaattagtgtgtatgtcgcggatgcattattgaaaaaaggaagtatgaaaacgggcgacaagctggatatcaagggcgtaggtcaggttgaagtcagcccaaacagcgttcagggctatgactacgaagcggatggtaatggcatcgtactgttaccggagcgcgtgatattcaacaaagagaatatcggcaaatacgatttctgatgtgcattacttaaccggagtaagttatggcagatttagacgatattaaagatggtaaagattttcgtaccgatcaaccgcaaaaaaatatcccttttaccctgaaaggttgcggtgcgctggattggggaatgcagagtcgcttaagccggatatttaatccgaaaacgggtaaaaccgtgatgctggcttttgaccatggttattttcagggaccgactaccggacttgaacgcattgatataaatatcgccccgctgtttgaacatgccgatgtattaatgtgtacgcgcggcattttgcgcagcgtagttccccctgcgaccaataggccggtggtactgcgggcgagtggtgcgaactctattctggcggaattaagtaatgaagccgtggcgttaagcatggatgacgccgtgcgcctgaacagttgcgcggtggcggcgcaggtttatatcggcagcgaatatgaacatcagagcatcaaaaatattattcagctggttgatgccggaatgaaagtgggaatgccgaccatggccgtgactggcgtgggcaaagatatggtgcgcgatcagcgttatttcagcctcgcgactcgaatcgccgctgaaatgggggcgcaaattatcaaaacctattatgtcgaaaaaggttttgaacggattgttgccggatgtccggtacccattgttattgctggcggtaaaaaattaccggagcgcgaggcgctggaaatgtgctggcaggctatcgatcagggcgcttctggtgtggatatggggcgtaatattttccagtctgaccatccggtggcgatgatgaaagccgtacaggcggtggttcaccataacgaaacggctgatcgggcatatgaactctatctgagtgaaaaacagtaactgcggatctaaggagaagaattatgcacgtcacactggttgaaattaacgttcatgaagacaaggttgacgagtttatcgaagtttttcgccagaaccacctgggctctgtacaggaagaaggcaatttgcgcttcgatgtcttacaggacccggaagtgaatagccgcttttatatctacgaagcctataaagatgaagacgcagtggcgttccataaaaccacgccccactacaaaacctgtgtcgcgaaactggaatctttaatgaccgggccgcgtaaaaaacgtctgttcaatggtttgatgccgtgaggcgaatttatcaattttatctacaattggggtaacgcgctgacgggagtaaaaaaatgtctgactggaacccctctttatatctacacttttccgctgaacgaagccgtccggcggtggagctgcttgccagagtgccgctggaaaatgtcgaatatgttgccgatcttggctgtggcccaggtaacagcaccgcccttctacaacaacgttggcctgcggccaggataacaggcatcgacagctctccggcgatgattgctgaagcgcgcagtgctttgccagactgccagttcgtggaagcagacatccgcaactggcaaccggtacaggcactcgatctgatttttgctaatgccagtctgcaatggctgcccgaccactacgaattgtttcctcatctggtttctttacttaatccgcagggcgtgctggcagtacagatgccagataactggctggagccgacccatgtgctcatgcgcgaagttgcctgggaacaaaactacccggatcgcgggcgtgagccgttggctggcgttcatgcttactacgatattttgagcgaagccggatgtgaggtcgatatctggcgaaccacctactatcaccagatgccgagtcaccaggcgattatcgattgggtgactgccactggattacgtccgtggttacaggatctgaccgagagcgaacagcagctttttcttaagcgctaccatcagatgctggaagagcagtatccactgcaagagaacggacagatactgctggcatttccgcgtctgtttattgttgcccggcgtatggagtaaatatcacgtcagctggtaatgacgatcgggaagaatttttgctggaatttcggcttcatcgttcatctgtaacaggtcaatttcaatagcgttgcagatggcatccagtggtaaatcattgttttcagtaccgaacggatcttccagttcttccgccagacaatccaggctaataaaagtgtaggaaatcagcacagagataaaaggcgtcatgtaatgcaggtccacgaccagcgcgaacggcagcatgatacaaaacagataaacggtacgatgcaaaatcagggtgtaggcaaagggaattggcgtataggcaatgcgctcgcatcctgccaggaccgcactaatatcattaagccgatcgttgaggctaataaacaggatatcactaagctgtccattgcggcgctgaaccgccaaccattctcccattattaacaagatacggttagctggagagttgctagccagtacacgctgaagatcttcagtcttgagataatgagccagcacttccgcctgtggctgtttgcgtaatgtcatgcgtaaacagtgggcgaaagcgatttgcagccgggcaaactcccttacacttgcgctatccggcaatgtcgtttttacctcgcgcagtaagctccgactggcaatcatcaactgcccccaaagttttcgcgcttcaacgtaacgggcgtacccggcattattacgaaaaccaagaaaaatggcgatggcgacaccgagaatgctgaacggtgcgagggtgaatttgatgcccagatgcgtgtaccagggcagcatgaaaataacagcgatagaaaagagaaaattgagtagtaagcggctggatatcttggataatacactgccgtgccagacaaaaatacggcgcagccagtgttgttgtggacgaacaatcatggttatcttcaggcgtggaaaagtcgccctattaaacgtgattacgatcacattctcaagacgctacttacaaattacctacaagcttacaacattagcaggcgctgcatgtggcacctgttaatgataaaggcatataggatgttgtaactaatatggtgaaataagaaacccggtcgaaaccgggttcagaagtaacggtgttattagcacaacggacgtacagcttcgcgcatccctttttcgagaatcgcatccaggtcattagcaacctgctcgaccagaccaggcacttgcgtcaggtcctgctcccagtggtctttttctgccaaaacaatcgctaccagttcctgggtgccgataacacggtcacgatgctggctccagagttgctgataacgttccagccagtgtgcatcgtcctgtaccggatatgtttcgccgttacgctcaccacgatagaacgcaatcaatgccgctaatgcgaaagtaaggcgcgccggaagtgtgccgtttgccttctgccctgccagcagctgtggcaggatgcgggtgcggaacttggtcataccgttgagcgcgatagacagcagctgatgcttaatgtacgggttacggaaacgcccggtgactgcactggcgaaagattccagttcatcacgaggcaaatccagtaccggaataatttcttcgtagatagctttttcaacgaatgcgcaaatttcagcatcgttcatcgcttcacctacggtatccagccctgcctggaacgccaccggcaccagcgcggtgtgcgcaccgttgaggattgccactttgcgttctttgtacggtttaatatcgtcaacaatcagcacgttgagcggatatttgtccagacgcagttcagtcgctaaggatttcggtccctgaatcacaaacaggtaaaagtgttcagcggtgtcgagaaaaccatcgtgataacccagttcttcttccagtttagccacttcatcgcgcggataaccggtaacgatacggtccaccagcgtagaacagaagctgttagcctgatccagccattgaataaatgcttctggcagtgcccactcttgcgcatagcgcagcaccagttcacgcaacgcgtcgccattgtagtcaatcaactcacacggaatgatgatccaacctttatccagcgcaccgttgaaatggctaaagcgttcgaacagcagacgggtcagttttgccggatagcttaccgctggcgcgtcatcgaatttatcgcccgcatggtagctgatacccgcttcggtggtgttagagaaaacaaagcgcatttccgggttgtgcgccagtttcaggaattcatcgtattcactgtagacgctgatttcacgattaacgctgcgaatcagacgcgcgtcgctgaccgcttcccccttctcattcaggccacggataatggtggtgtacagaccatcctgcgtgctcagactcggcgggaaactagtttcaatcggacgaacaacgaccacgccagaattcagatcggtgtgctcattcaggagatcgatttgccagtcaacaaaggcgcgcaggaagttaccttcaccaaactgaatgatacgttctggatactgtgcaccgggaaaatcgcgacgatttagtgttttcacaatgggttcccttctgattagtcatacaacctgtttgaattggtacgacaggttagcaaactttaatacgccgaacccctgttttgatcaactcctgatgattaatgagcagttttatgagaaaagtgtggcgcggatcatggtttaatcgaggaaaaacgccttttcctggatcataaagtggtagaacacattgcattcaaatcgcgcgtaatgaataaagatgtcagacaacttcctcaccgtaacgcatagtgctggtacggttgcgcccatctttcttgctgcgatacagacacgtatcggcttcgaccatcaatttattaaagtcatcggtcagcgttaggtagcttgcgcgaccactaccgacgccaatacttaccgtgagataaagcgttttttgttgccaggtgaatggttgcagttcaacgcctttacggattttttccgccattagcagaccatcgacaggattcacgctcggcactgcaacagcaaattcttcgccgcccattcgcgccaccagccccttatcaccgacaatcttctgaatatgccgggcaaacacgcttaacactttatcgccacattcatgtccatagttatcgttaatgcttttgaaatagtcgatatcaagcagcatgacagtcagatgttgtgtctgtttcaggcttggacttttcagcgcctcataaagaccggaccgactgtaaacctgagtcagaaaatcaaagtcggctcgcagcgcaacttgcttcattaggctattgatcgctgccacgctaaaagaaaccataattgggcatatcgccatcgtggcaataccgagacgtgcggagaacatttgcggaatggagaacgggctaccgacgctgatatcaatcacgctatttgccaccagtacgatttccaccgcaccggtgacaaaggtcaacagacatgttacctgcggcgtatagcgcactgcacaccagattaatgcaggcagcgggaacgccagactccccgctccgccaatgactacgctggcaataacgctcacaataagcgcgatggcgggcatcatctgttctgctttaaagcgcggcagcactccaggaatagccaacgtcagcatacaaggcacgatcaacacgcccgtactgaattgctcactgaaccagtccgcaagcaaaggccagaaatccagactatcaatactgaccgaaccaagatagcatgttcgctgacagcggcggcaaataaaggtaccctgggaatgctattttgtcgttttccgcaattctcatggctgattcatctgtacaaccagccagtgatagattaccgccacgatataacgttgttgttcttcgcttaagctaacaccctgcggaatgttatgccacttagccagacaaccgcgacagcaggtcgcggtggcgtgctgagcgataaacaccggatgcccgcgcatgggggtttgcttaccgtcattagccggtaatgccggagcaagacgtttagcgacaaaatccgccgcatgttgttcgatgactggcgcgcctttctccaggcaatactgacgctctttcatgcccagacgaaagcgagagcgaaatttactacgggataaacgcgcgaagagtggatcgagagactgcattaataaacgctacgccctaactgtttcgtcaattgttcaagaacggcaatacccgcaaggctgttacctgcatcatccagttccggactccagacagcgatggccatttcatgcggaacaatcgccacaataccgccaccaacgccagatttcgccggtagccccacccgccaggcaaactcccccgcgttctggtacataccactggtcgccatcagcgcgttaatttgccgcgcctgcattggcgtcaccactggttcatcaatatgaatagctttcccctgattagccagaaagacaaacgtccgggccagctctacacagctcattttcagagcgcagtaatgaaagtagttttgcagaacggttgtcacgtcatgatggaaattgccaaagctcttcatcagccaggcgatagccgcatttcgcgcggaatgttcaaattcggaacgcgctaccaccgtatcgtaggaaatatcagacacaccgcttaagccgcgcacgacttccagcatacgttgccgtggtgcgcttaatcgcccttgcaacatatcgcagaccaccagcgcaccggcattaatgaacggattacgcggtataccctgctccatttccagttgcactaaggaattgaacggacttccagacggatctttgccgacgcgttgccagatttcctcttcggagtaatgacgcatggcgacaacgagactcagcactttggaaatagactgaatggaaaaacgttcttgcgcgtctccggcctgaaaaagctgtccgtcaacggtacagatagcaatccccaatcgggaaccgtctactgtagccagcgccggaatataatccgcgactttaccctgaccaatgagcggccgcacttgccgcaagatgttttctaaaattgcattatccatggcgactgccactttctactcctggaccgcaggtctgaaaagacctgcgagtatatcagagctgaatatgtcgcgtcagatccggtctttccacaccgtctggatattacagaattcgtgtaagccgaaatgggaaagctcacgaccaaagccactctttttcacgccaccaaaggccactcgcgcgtcgctggcacaataaccattgataaacaccccaccgcattccagacgtgccgccatctgtctggcctgtgtttcgtcagtggtaaaaatggtcgcactaaggccgaactcactatcattagccagttccagtgcatgttctgcatctttcgcaatggtgattgccgcaacggggccaaacatttcttcccgaaacgcggtcatttctggggtaacattcgccagaaccgttggcggatagtagttacctgccccagccatcttttccccgcccagtaacaaacgcgcaccctgcgccagggttttctccacctgatgatgcagctcatcacgtaaatcaaaacgagccattggtccgagagcgttctcttcgtcacggggatcgcccattttcaaggctgccgcagctgccacaaaacgttcggtaaatgcgctagcaattccctcttcgataataaagcgttttgccgctgcacatacctgtccggtattctgataacgtccggctaccgccgctttcaccgccagttccagatcggcatcgttaagcacaataaacggatcgctaccgcccagttccagtacgcattttttcagtgccgctccagcctgtgcgccaatagccgctcccgcacgaacacttccggtcaccgtgacagcagcaatgcggctgtctttaatcatctgactgacaccgtcgttgtcggcattcagccagccatatacgccttgtgggatacccgcatctttaaacacctgggcaatgagctgtgcacagcccatcacattcggcgcatgtttaagtaagtagccgttacctgcaagaatgatgggaacagcgccacgcatcacctgccataacggaaaattccacggcataatcgccagaatcgtccccaacggtcgatactcaataaccgcctgctgattttccaccagcgtaggttccgccttcagcattgccggaccatgttctgcataccagtcacacaaattcgcgcttttcgccacttcagcgcgcgcctggttgattggtttgcccatttcgcgggtgatcatttgcgccatttcttcgctacgagcgcgcagagccttaccgatatcacgcagtttttcagcacgataatctatatttgtctcgcgccagtcgcgaaagcctgctgccgccagctgaagtgcgttttcgatatcgtcagcgccagcccacggcagcacagaaagttgttcacccgtggcaggatttatgctaattgcatgagttgccggagtaatggtcatcggggtatctcctttatgagtcatggtatgaagatacgcagatttactcttgctttaaaatgaataatattaagccacttattcacgaatcgagaatgctatggatctgacccaactggagatgttcaacgcggttgccgaagctggcagcataacccaggctgcagcaaaagtgcatcgcgtgccgagcaatctcactacccgtctgcgccagctggaaacagaactgggggttgatctgtttattcgcgagaatcagcgtttacgtctctctcctgccgggcataactttttacgctatagccaacaaattctcgcgttagtggatgaagcgcggagcgttgtcgctggcgatgagccgcaaggtttattttctcttggtagcctggaaagcaccgctgcagtgcgcattccagccacgctggcggaattcaaccgtcgttatcccaaaattcagtttagtctttccaccggcccttccggcactatgctggatggtgtactggagggaaaactgaatgcggcgtttattgatggacccattaaccatactgccatcgacgggataccggtataccgcgaggaactgatgatcgtcacgccacaaggatatgcgccagtaacccgtgccagtcaggttaatggcagtaacatttatgccttccgcgccaattgtagctatcgtcgccacttcgagagctggtttcatgctgacggtgccgctccgggaactatccatgagatggagtcttatcacggaatgttggcctgtgtgatcgcaggagcaggcattgcgcttattccgcgctctatgctggaaagtatgccggggcatcaccaggttgaagcgtggccgttagctgagcaatggcgttggttaacaacctggctggtctggcgtcgtggtgcgaaaacacgtccgctcgaggcatttattcaactgctggatgtgcctgacagcgcaagacagggatatcaatgagctatttttgatagttcttgcggttaatatgctctatatagtgatgttccgatgacttatgactatatggggcaaatatggttacgccagtaagcatcagcaattacatatctcttcctgatgattttcccgtacgtaatattgcaccgcaggtaaaagaagttttaaaggattttattgatgcacttagtacaataatatgtaatgaagagtggcgcacgtctttaaacatcaacagtgccacaaaaaagatatttaataaccttgacaacttaagttatattcagaggacttcttttcggggtaacgacacgctatacaatgaaaaggttcagtttaaactcacttatcccgccaggaatggaagacacaaagaaaatattgaatttcaggtagtaataaatttaagccctatttatttagataattttcgccatgatggagaaattaatattttttgcgctcccaacccaaagcctgtcactatggggcgcgtatttcagaccggcgtcgagcgtgtactctttctgtttctgaatgattttattgaacaatttccaatgatcaaccctggtgttcccatcaaaagagcgcatacaccacatattgaacccctgcctagcgatcaccataccgctgcagattacttacgccagtttgatttgcttgtcctgaattttatctctcgcggtaattttgtcatactcccccgattatggaataactctgaggttcacagatggttcgtcaataaagatcctaacttgatcaccgccattctcgacataacggacagcgaattaaaagaggatttgttgcaaagcctgatggatagtttaggttctaacaaacatgtactacccgaagtctgcatctgctttttatcccttttagcagaacaagaatctcctcattttcagaacttgtttttatttttcgccaatatgttattgcactatcaccaatttatgaatcccaatgaaagtgatttgaatgacgtgttgatgccagcaagtttaagtgatgataaaattatcaaacatatggcgcgcaggaccctcaaactgtttgtaaaaaatgaaacaccgccaaaagttactcacgaagacctggtgaaaaacaggcctcgctcccctgtcagaccacctatacccgcaaccgccaaaacgccagacctccctgaacgtcattaaaccgtgatgttaccgactctctgacgcgtgaaagaatcagcgtcagagaaacggaaaacgcgatccagatcacaaatgcattgtattcacatcattaaccgttttaagatcatttcatcactttttcgcaactcacccgataatctgttatgacaacaaacactgtttcccgcaaagtggcgtggctacgggtcgttacgctggcagtcgccgccttcatcttcaacaccaccgaatttgtccctgttggcctgctctctgacattgcgcaaagttttcacatgcaaaccgctcaggtcggcatcatgttgaccatttacgcatgggtagtagcgctaatgagtttgccttttatgttaatgaccagtcaggttgaacggcgcaaattactgatctgcctgtttgtggtgtttattgccagccacgtactgagctttttgagctggagctttaccgttctggtgatcagtcgcattggtgtggcttttgcacatgcgattttctggagcattacggcgtctctggcgatccgtatggctccggccgggaagcgagcacaggcattgagtttaattgccaccggtacagcactggcgatggtcttaggtttacctctcgggcgcattgtgggccagtatttcggttggcgaatgaccttcttcgcgattggtattggggcgcttatcacccttttgtgcctgattaagttacttcccttactgcccagtgagcattccggtagtctgaaaagcctcccgctattgttccgccgcccggcattgatgagcatttatttgttaactgtggtggttgtcaccgcccattacacggcatacagctatatcgagccttttgtacaaaacattgcgggattcagcgccaactttgccacggcattactgttattactcggtggtgcgggcattattggcagcgtgattttcggtaaactgggtaatcagtatgcgtctgcgttggtgagtacggcgattgcgctgttgctggtgtgcctggcattgctgttacctgcggcgaacagtgaaatacacctcggggtgctgagtattttctgggggatcgcgatgatgatcatcgggcttggtatgcaggttaaagtgctggcgctggcaccagatgctaccgacgtcgcgatggcgctattctccggcatatttaatattggaatcggggcgggtgcgttggtaggtaatcaggtgagtttgcactggagtatgagcatgattggttatgtgggcgcggtgcctgcttttgccgcgttaatttggagtatcattatatttcgccgctggccagtgacactcgaagaacagacgcaataattgaaaggcccattcgggccttttttaatggtacgttttaatgatttccaggatgccgttaataataaactgcacacccatacataccagcaggaatcccatcagacgggagatcgcttcaatgccacccttgcccaccagccgcataattgcgccggagctgcgtaggcttccccacaaaataaccgccaccaggaaaaagatcagcggcggcgcaaccatcagtacccaatcagcgaaggtactactctgacgcactgtggacgcgctgctaataatcatcgctatggttcccggaccggcagtacttggcattgccagcggcacaaaggcaatattggcactgggttcatcttccagctcttcgctcttgcttttcgcctccggactatcaatcgctttctgttgcggaaagagcatccgaaaaccgataaacgcgacgattaagccgcctgcaattcgcagaccgggaatgctaatgccaaatgtatccatcaccagttgcccggcgtaatacgccaccatcatgatggcaaatacgtacacgctggccatcaagctctgacgattacgttcggcactgttcatgttgcctgccaggccaagaaataacgcgacagttgttaatgggttagctaacggcagcaacaccaccagccccaggccaattgctttaaacaaatctaacattggtggttgttatcctgtgtatctgggttatcagcgaaaagtataaggggtaaacaaggataaagtgtcactctttagctagccttgcatcgcattgaacaaaacttgaaccgatttagcaaaacgtggcatcggtcaattcattcatttgacttatacttgcctgggcaatattatcccctgcaactaattacttgccagggcaactaatgtgaaaagtaccagcgatctgttcaatgaaattattccattgggtcgcttaatccatatggttaatcagaagaaagatcgcctgcttaacgagtatctgtctccgctggatattaccgcggcacagtttaaggtgctctgctctatccgctgcgcggcgtgtattactccggttgaactgaaaaaggtattgagcgtcgacctgggagcactgacccgtatgctggatcgcctggtctgtaaaggctgggtggaaaggttgccgaacccgaatgacaagcgcggcgtactggtaaaacttaccaccggcggcgcggcaatatgtgaacaatgccatcaattagttggccaggacctgcaccaagaattaacaaaaaacctgacggcggacgaagtggcaacacttgagtatttgcttaagaaagtcctgccgtaaacaaaaaagaggtatgacgatgtccagacgcaatactgacgctattaccattcatagcattttggactggatcgaggacaacctggaaagcccactgagtctggagaaagtgagtgagcgtagcggttactccaaatggcacctgcaacggatgtttaaaaaagaaaccggtcatagtttaggccaatacatccgcagccgtaagatgacggaaatcgcgcaaaagctgaaggaaagtaacgagccgatactctatctggcagaacgatatggcttcgagagccaacaaactctgacccgaaccttcaaaaattactttgatgttccgccgcataaataccggatgaccaatatgcagggcgaaagccgctttttacatccattaaatcattacaacagctaattgaaaacgtgacaacgtcactgaggcaatcatgaaaccacttagttccgcaatagcagctgcgcttattctcttttccgcgcagggcgttgcggaacaaaccacgcagccagttgttacttcttgtgccaatgtcgtggttgttcccccaagccaggaacacccaccgtttgatttaaatcacatgggtactggcagtgataagagcgatgcgctcggcgtgccctattataatcaacacgctatgtaatttgttctggccccgacatctcggggcttattaacttcccacctttaccgctttacgccaccgcaagccaaatacattgatatacagcccggtcataatgagcaccgcacctaaaaattgcagacccgttaagcgttcatccaacaatagtgccgcacttgccagtcctactacgggcaccagtaagcttaacggtgcaacccgccaggtttcatagcgtcccagtaacgtcccccagatcccataaccaacaattgtcgccacaaacgccagatacatcagagacaagatggtggtcatatcgatagtaaccagactgtgaatcatggttgcggaaccatcgagaatcaggctggcaacaaagaagggaatgattgggattaaagcgctccagattaccaggctcatcaccgccggacgcgtactgtggctcatgatctttttattgaagatgttgccacacgcccaactaaatgctgccgccagggtcaacataaagccgagcatcgccacatgctgaccgttcagactatcttcgattaacaccagtacgccaaaaatcgctaaggcgatccccgccaattgtttgccatgcagtcgctccccgaaagtaaacgcgccaagcatgatagtaaaaaacgcctgtgcctgtaacaccaggctagccagtccagcaggcataccgaagttaatggcacaaaaaagaaaagcaaactgcgcaaaactgatggttaatccataccccagcagcaaattcagtggtactttcggtcgtgcgacaaaaaagatagccggaaaagcgaccagcataaagcgcaaaccggccagcatcagcggtggcatgttatgaagccccactttgatgaccacaaaatttagcccccatacgaccactaccagtagcgccaacaccccatcttttcggctcattctaccgcctctgaatttcatcttttgtaagcaatcaacttagctgaatttacttttctttaacagttgattcgttagtcgccggttacgacggcattaatgcgcaaataagtcgctatacttcggatttttgccatgctatttctttacatctctaaaacaaaacataacgaaacgcactgccggacagacaaatgaacttatccctacgacgctctaccagcgcccttcttgccagcagcttgttattaaccatcggacgcggcgctacgctgccatttatgaccatttacttgagtcgccagtacagcctgagtgtcgatctaatcggttatgcgatgacaattgcgctcactattggcgtcgtttttagcctcggttttggtatcctggcggataagttcgacaagaaacgctatatgttactggcaattaccgccttcgccagcggttttattgccattactttagtgaataacgtgacgctggttgtgctcttttttgccctcattaactgcgcctattctgtttttgctaccgtgctgaaagcctggtttgccgacaatcttagctccaccagcaaaacgaaaatcttcagtatcaactacaccatgctaaacattggctggaccatcggtccgccgctcggcacgctgttggtaatgcagagcatcaatctgcccttctggctggcagctatctgttccgcgtttcccatgcttttcattcaaatttgggtaaagcgcagcgagaaaatcatcgccacggaaacaggcagtgtctggagcccgaaagttttattacaagataaagcactgttgtggtttacctgctctggttttctggcttcttttgtaagcggcgcatttgctagttgcattagtcaatatgtgatggtgattgctgatggggattttgccgaaaaggtggtcgcggttgttcttccggtgaatgctgccatggtggttacgttgcaatattccgtgggccgccgacttaacccggctaacatccgcgcgctgatgacagcaggcaccctctgtttcgtcatcggtctggtcggttttattttttccggcaacagcctgctattgtggggtatgagtgctgcggtatttactgtcggtgaaatcatttatgcgccgggcgagtatatgttgattgaccatattgcgccgccagaaatgaaagccagctatttttccgcccagtctttaggctggcttggtgccgcgattaacccattagtgagtggcgtagtgctaaccagcctgccgccttccagcctgtttgtcatcttagcgttggtgatcattgctgcgtgggtgctgatgttaaaagggattcgagcaagaccgtgggggcagcccgcgctttgttgatttaagtcgaacacaataaagatttaattcagccttcgtttaggttacctctgctaatatctttctcattgagatgaaaattaaggtaagcgaggaaacacaccacaccataaacggaggcaaataatgctgggtaatatgaatgtttttatggccgtactgggaataattttattttctggttttctggccgcgtatttcagccacaaatgggatgactaatgaacggagataatccctcacctaaccggccccttgttacagttgtgtacaaggggcctgatttttatgacggcgaaaaaaaaccgccagtaaaccggcggtgaatgcttgcatggatagatttgtgttttgcttttacgctaacaggcattttcctgcactgataacgaatcgttgacacagtagcatcagttttctcaatgaatgttaaacggagcttaaactcggttaatcacattttgttcgtcaataaacatgcagcgatttcttccggtttgcttaccctcatacattgcccggtccgctcttccaatgaccacatccagaggctcttcaggaaatgcgcgactcacacctgctgtcacggtaatgttgatatgcccttcagaatgtgtgatggcatggttatcgactaactggcaaattctgacacctgcacgacatgcttcttcatcattagccgctttgacaataatgataaattcttcgcccccgtagcgataaaccgtttcgtaatcacgcgtccaactggctaagtaagttgccagggtgcgtaatactacatcgccgattaaatgcccgtaggtatcattaaccaatttaaatcggtcaatatccaacaacattaaataaagattcagaggctcagcgttgcgtaactgatgatcaaaggattcatcaagaacccgacgacccggcaatcccgtcaaaacatccatattgctacggatcgtcagcaaataaattttgtaatcggttaatgccgcagtaaaagaaagcaacccctcctgaaaggcgtcgaaatgcgcgtcctgccagtgattttcaacaatagccagcattaattcccgaccacagttatgcatatgttgatgggcagaatccattagccgaacgtaaggtaattcatcgttatcgagtggccccagatgatcaatccaccgaccaaactggcacagtccataagaatggttatccgttatttctggcttactggcatctctcgcgaccacgctgtgaaacatactcaccagccactggtagtgggcatcgatagccttattgagatttaacaagatggcatcaatttccgttgtcttcttgatcattgccactcctttttcacagttccttgtgcgcgctattctaacgagagaaaagcaaaattacgtcaatattttcatagaaatccgaagttatgagtcatctctgagataacattgtgatttaaaacaaaatcagcggataaaaaagtgtttaattctgtaaattacctctgcattatcgtaaataaaaggatgacaaatagcataacccaataccctaatggcccagtagttcaggccatcaggctaatttatttttatttctgcaaatgagtgacccgaacgacggccggcgcgcttttcttatccagactgccactaatgttgatcatctggtccggctgaacttctcgtccatcaaagacggccgcaggaataacgacattaatttcaccgctcttatcgcgaaaaacgtaacggtcctctcctttgtgagaaatcaaattaccgcgtagactaacgctagcgccatcgtgcatggtttttgcgaaatcaacggtcattttttttgcatcatcggttccgcgatagccatcttctattgcatgaggcggcggtggcgctgcatcctgttttaaaccgccctggtcatctgccaacgcataaggcatgacaagaaaacttgctaatacaatggcctgaaatttcatactaactccttaattgcgtttggtttgacttattaagtctggttgctatttttataattgccaaataagaatattgccaattgttataaggcatttaaaatcagccaactagctgtcaaatatacagagaatttaactcactaaagttaagaagattgaaaagtcttaaacatattttcagaataatcggatttatatgtttgaaaattattatattggacgagcatacagaaaaagcaaatcacctttacatataaaagcgtggacaaaaaacagtgaacattaatagagataaaattgtacaacttgtagataccgatactattgaaaacctgacatccgcgttgagtcaaagacttatcgcggatcaattacgcttaactaccgccgaaagttgcaccggcggtaagttggctagcgccctgtgtgcagctgaagatacacccaaattttacggtgcaggctttgttactttcaccgatcaggcaaagatgaaaatcctcagcgtaagccagcaatctcttgaacgatattctgcggtgagtgagaaagtggcagcagaaatggcaaccggtgccatagagcgtgcggatgctgatgtcagtattgccattaccggctacggcggaccggagggcggtgaagatggtacgccagcgggtaccgtctggtttgcgtggcatattaaaggccagaactacactgcggttatgcattttgctggcgactgcgaaacggtattagctttagcggtgaggtttgccctcgcccagctgctgcaattactgctataaccaggctggcctggcgatatctcaggccagccattggtggtgtttatatgttcaagccacgatgttgcagcatcggcataatcttaggtgccttaccgcgccattgtcgatacaggcgttccagatcttcgctgttacctctggaaaggatcgcctcgcgaaaacgcagcccattttcacgcgttaatccgccctgctcaacaaaccactgataaccatcatcggccaacatttgcgtccacagataagcgtaataacctgcagcatatccgccaccaaaaatatgggcgaaataactgctgcgatagcgtggcggtatagcaggaagatccatattttccgccaccagcgcccgcaattcaaaatcatcgacatcctgcattgcttcgttttcttccaggcaatgccagcgcatatcgagaagtgcggcgctaagcagttcgctcatctcataccctttgttgaacaggctggcattacgcattttctgttgcagttcgtcaggcattgctgccccgctctgataatgccgggcgtagcgagcgaatacctgcggatgcgttgcccagtgttcgttgatttggctcggaaattcgacaaaatcacgcggcgtgttggtgccggaaagcgtggcataacgctggcgggcaaaaaggccgtgcagcgtatgaccaaattcatggaataaggttatgacatcatcccagagtaacaacgcaggctcaccggcagcgggtttctgataattgcagacgttataaattaccggatgtgttttattaagcgtactttgctcaacaaaattgcccatccatgcaccgccgcttttactatcacgggcgaagaaatcaccgtaaaataacgccagccccacgccattatgatcaaaaatttcccacacacgaacgtcaggatggtagacaggaatatcaaaacgttcgacaaacttaataccgaagagctgattcgcggtccagaatacaccttcatttaacaccgtgtttaattcaaaatatggcttgagctgcgcctcatcaagatcaaatttctcccgccgtacctgttccgcataaaatgcccagtcccacggctgcgcgctaaacccgccctgctgcttatcgataaccgcctgtatggaggctaattcatcgctcgcacgttgacgcgccgctggaacaatttcccgcataaagttaagtgctgcttcaggtgtttttgccatctgatcggcgattttccatgcggcataatgaggaaaaccaagtagtgttgcctgttgtgcacggatctccaccagacgttgaatgatagcgcgggtatcattggcatcatttttttccgctcgcgtccagcccgcaataaacagtttttcacgcgtcgcacgatcgcgcatttcggcaagcgccggttgttgggtggtattcagcagcggaatcagccatttgttatccagacctttctcgcgagccgcctctgccgccagcgcaatctcttgctcactcattcctgccagctgcgcgatatcgttcacaaccagaccgccggatttatttgctgccagtaatcgctggttaaactggctggtcagggtcgcagcttctgtattcagtacttttaattttgctttatcagcttgcgcaagtttggctccggcaaggacaaaacgttgatgaatcacctccaccaggcggatggattcactatcaagccccagggattcacggcgctgccagacagcatctacccgcgcgaataattcaccgttcagatagatatcattagccagttccgccagttcagcggaaaactgctcgtcaagacgctgtaattcatcattggtatgcgccgcagtcatcgcaaaaaagacgctggtaacgcgggtaagtaattctccgctttgttccagtgccagaatagtattgttgaaatcaggcatttgcgggttaagcgcgatggcagcaatttctgcccgcttttgctgcattccctcatcgaatgccgggcgatagtgatgattggcaatttgatcaaaatggggagccagatacggcagtgtgctttgcacaaggaaaggattcattgttgtcattttcttctcctgaacgcgaggtgttccatagcgtaggcttactgataacggagtgcaatcttgcaatccagtattacccgctcttaagcatcccgtgctatgttattgacacacaaaagcgttgaggaacagtgagaagcgcagtgcccagccatcccgatactgctgctttcaccaaatccttagtgcttctttcgtgtttttctattgtcataatggttatctctaaaaaagaggtaagatgcgtactacttactcgccgttattggtattattcagaaaaagtgagtaagactttgcagcaatgtttttgatcctgttcaaataaactaatggcatcagcaacatgctggaaatcaaacgtatgggtaattaatttttctggtttaattaaccctttacttaaccagtcgataacgatcgggaatttatttgcatttaagcgactagagaaaatagagagttcttttccggtaattccttgctgaatcacttcagacggttcactggagaaccccatcaatacaatacgtgccgctggagaagccagcgttacggcctctttcaggatagaaggatgacaagccgcatcgataattaatgtcggcttgatgcctttttcagtgaaaatctcgccaagcggtgtctggctgttattaatcgcccagtcagccccgctctctttcgctttttccagtcgttcatcaatgcgatcggcaacaatcacatttttaacgttatagacgccttttaatacctgaacgatcgtcaggccgattggaccggcaccataaaccagaacggtatcattttcagtcggttgaccatgtccggttacgttagccgcaatggtaaaaggttcgatcattaccgcatattgatcggccactgcttcaggaattttccacgcattttttgccggaaccacggcatattcactgaaaccaccgtcagcgtgcacacctaatacagccagtgtcgtacaaacgttcggtttacctatagagcacggatagcaatgcccacagctgaccaccggatcgacagcaacacgttcaccgactctggcgctttccacgccttcacccactgcatcaatgacgccaaagaattcatgaccaatgacgcgcggatatttcgcaaaaggattatgcccacgataaatatggctatcactaccacaaattccggcaagtttcacttttactcgtacttcacccgcactcggggtgggtatttcacgttcgacaatcgccagttgattcggtttttcaattaatatgcttttcattatcttactccttaccagttccacagcgtgccatcttccagacgtgcgactggtagataagcaggttcatagggatatttcgccgccagcttttcatcgaattcgataccaagacccggtttgtctcccggatgcatatagccgttatcgaaagtccagttgtgcgggaagacttcgagcatttgttcggaataacccatgtattcctggacaccgaaattggggacccacagatcaaagtgcagcgccgcagccatgcagactggactcaaatcggaaggaccgtgactgccagtacgtacctgatacaggctagcaaaatcggcaatccggcgcataccggtaattccgcctgcatgggtcagcgtggtgcggatataatcgatgagttgctcttcaatcagttgtttgcagtcccagatgctgttgaagacttcacccactgcgatgggtgtgacggtatgttggcgaatgagacggaagcattcctggttttccgcaggcgtcgggtcttccatccagaacatgcgataatcttcaatgcttttaccaaagcgcgccgcttcaataggcgttaagcgatggtgcatgtcatgcagcaaatgttcattaaaaccaaacttgttacgtaccgcgtcaaacaatttcggcatgaaatcgaggtatttctccgtgctccacagctgctcttccggccactgtcctttggttgcgggttcataagccagacctttacctttgctcatgccgtaggtggttttcataccagggattccgcactgcacgcggatggctttgaatccaagctcttgatgacgggcataatcatccagagcttcatcaatactgtgaccggtggtatggcaataaaccatcaccccttcacgagacgcgccgccgagtaactggtaaagcggcatgttggcagctttggctttaatatcccacagcgccatatcaaccgcactaatggcgctcatcgtaaccggaccgcgacgccagtaagcacctttatagaaaaactgccagatatcttcgatacggtgcgcatcgcgaccaataagctgcggacaaaggtgatcctgcaaataagaggccacggaaagctcacgtccattgagggtggcatccccaaggcccgtaataccgtcctcagtggtgatttttaatgtgacgaaattacgccccggacaggtaacaaaaacttcagcctttacgatcttcatgttcgattccttgcatcgcttgtcgtgatgcatgaaatctacgcaactgagctactaccatacaagtataaagatcgaaaaaagccggagtgatcacaaaaaaaggcgtatatttgcgctgtgaatggttgacaaaagatgaaatagaataccttttgtcagctgacacttcctcttatcttattgataaaatggatttatgttcttacgtgcgcccccagcccgcaacaatgatcaacatgccgcaaagcgcaatcaacgcacccgtccagtcataaagagtcagtttcacgccatccacaacgcgcagccacatcaacgccgtgcagacataaacgccaccataagccgcgtaaacacgcccactcgccgctggatgcaacgttaacaaccagacaaacagcgccagactaatccccgccggaagcaacagccagatactggcgtttcgttttaaccacaaccagggcagaaagcatccaataatttcacacagcgcagtagcaaaaaatagtaacgttgttttaatcatctttgtctcttattgacatcatgtatagttatagggcgacataatatcatcaatataaacaccctcctggtacgttttgcgtccgcagtggatggtgtagaatcacctttaatcattcatacagggaatgaattatgaaaatcactctcagcaaacgaatcggcctgctcgctattctgctgccttgcgcactggcattgagcacaactgttcatgccgaaactaacaaactggtgattgagtctggcgacagtgcacaaagccgccagcacgccgctatggaaaaagagcaatggaatgacacgcgcaatctgcgccagaaagtgaataaacgcactgaaaaagagtgggataaagccgacgccgcttttgataaccgcgataaatgtgagcaaagcgccaacatcaatgcctactgggagcccaatactttgcgctgcctggaccgtcgaactggccgcgttattaccccctaacctgttattgatttaaggaatgtaaggacacgttatgccaagcgcccacagtgttaagctacgcccgctggagcgtgaagatttacgctatgtacatcaactcgacaataacgccagtgtgatgcgttactggtttgaggaaccctacgaagcctttgttgaactctctgatctgtatgataagcatattcacgatcagagcgaacggcgctttgtggtggaatgtgacggcgaaaaagccggtctggtggagctggtggaaattaaccatgttcatcgccgcgcagaatttcagataattatctccccggagtatcaggggaaaggtctggcaacccgtgccgccaaattagcaatggactatggctttaccgttctcaatctctataagctgtatctgatcgttgataaagagaatgaaaaagcgattcacatttaccgcaagcttggctttagcgttgaaggtgaattgatgcacgagttctttattaatggtcaatatcgtaatgccattcgcatgtgtatattccagcatcagtatctggcagagcacaaaacaccgggtcagactctcctgaagccgaccgcacaataacattaataataatcgatcgtatttttgatggtgtaaacccgttcgacggcgggttttactccttcatcaacaatgattagctgacagtccaccggattagcgtgactgtcatattcacagctctgttttacattaccaacccgttgattattcagtaaagtaaccgctgtgtaatctaattttttgatcggatccgtacttggcgtggcgctgacagataatgttttgtcgttacttttcgtggttttacccagcggataaccctgatcatcatagcgatattccatctgcatttgtttgctgctggctttaatcacgaagccattatcatcggtttcccaactcaccccggcagaaggtaattctgctagctggcattttccctgtaaacgtactctcttctccagcgtctcggcatcacggtaataattggcgtccagtaccagagcgaccacggtattattttccagatccagtaattcgagactatcaaaacagccttcttcgctcaaagtcccagaaacacgtttcgtcacttcaccttgctcatccattaatgtctgagtgaaatcttttaccggaccacgcagcggatcaaaatcgaattcattagagaaactggccatctcaggggtaaaactaagtgttacctctgtgcggtcacatcctgtgaggaatatcgcgagtaagcatggtagtaatttgtatttcacaacagtcaccagagagtagagatgattctcaatcatagtagcaaatacagtactttacacgttaaatgctatgcttaaagaagttatcttcgcgtaaggagcttatgatgaaactcagtacctgctgtgccgcgcttctgctcgccctcgccagtcccgcggtactcgccgcgccgggatcctgtgagcgcatacagagcgatataagtcagcgcattatcaataatggcgtacccgaaagcagcttcacgttaagtattgtacccaatgaccaggttgatcagcctgattcccaggtcgtcggccattgcgctaatgatacgcataaaattctctatacccgcaccaccagcggtaacgtctctgctcccgcgcagtctagccaggatggcgcgcctgccgaaccgcagtaacacattatcgactgaacgccggatatgacaaatccggcgatttgaacatacaacataatcccaccttattactcatacccttctattgatatggattaataattcttaacccaaaatgggtagactccctctattgttagcgcgctaaatattcaatatataaacttttatataacgataaagaacagggagtgagttatgtccaaaaatgaacgaatggtgggcatcagccgcagaacactcgttaaatctaccgcgataggttctctggcgctggctgcaggcggtttttctttgccgtttaccctgcgcaatgcagcagcagcggtacaacaggcccgcgaaaaagtggtctggggtgcctgttccgtcaactgtggtagccgctgtgcacttcgtctacatgttaaagataatgaagtgacctgggtggaaactgacaataccggcagcgatgagtacggcaaccatcaggtacgcgcctgtttgcgcggtcgctccatccgccggcgtattaatcatcccgatcgcttgaattacccaatgaaacgcgtgggcaaacgcggcgaaggcaaattcgaacggattagctgggatgaagccctggatactatcgccagtagcctgaagaaaaccgtcgaacaatatggcaatgaggctgtatatattcagtactctagcgggatcgttggcggcaatatgacccgctctagcccaagtgccagcgcggtcaaacgcctgatgaactgctacggcggtagtctcaaccagtatggctcctacagcactgcgcaaatttcctgtgccatgccctacacctacggcagtaatgatggcaacagcaccacggatattgaaaacagcaagctggtcgtgatgtttggtaacaacccggcagaaacccgcatgagcggtggtggcatcacttatcttcttgaaaaagcgcgcgagaaaagcaacgccaaaatgattgttatcgatccgcgatataccgatacggctgccggtcgtgaagacgaatggctccctattcgcccgggcaccgatgccgcgctggttgcgggtattgcctgggtattgattaacgaaaatctcgttgatcaaccttttctcgataaatactgcgtcggctatgacgaaaaaaccttacccgcagatgcacccaaaaatggtcactataaagcctatattcttggtgaaggtgacgataaaacagcgaaaacgccgcagtgggctagccaaattaccggtatcccggaggaccgtatcatcaaactggcgcgtgaaattggcacagcaaaacccgcttatatctgccagggctgggggccacaacgccaggcaaacggcgaactgactgcacgcgctattgctatgttacctattttgacgggcaatgtcggcatcagcggcggaaatagtggcgcgcgtgaaagcacctataccattaccatagaacgcctgccggtgctggataatccggtcaaaacgagtatctcctgcttcagctggacagatgctatcgatcatggtccgcaaatgacggcaatccgcgacggcgtccgcggcaaagataaactggatgtgcccattaagttcatctggaactacgcgggaaataccctcgttaatcagcattctgacatcaacaaaacgcatgaaattctgcaggacgaaagcaaatgcgaaatgattgtggtcatcgaaaactttatgaccagtagcgcaaaatatgccgacattctgctgccagacctgatgaccgttgagcaggaagatattattcctaacgactacgccggtaacatgggatatctcattttcctccagcctgtcaccagcgaaaaattcgaacgcaaaccgatttactggatcctgagtgaagtcgcgaaacgtcttggacctgacgtctatcaaaagttcacagaaggtcgcacgcaggaacaatggttacaacatctgtacgccaaaatgcttgccaaagatccggcgttaccgtcttacgacgaactgaaaaaaatgggtatctataagcgtaaagatcccaatggccattttgtcgcctacaaagcatttcgtgacgaccccgaggcaaatccacttaaaacgccttccggtaagattgaaatttattccagcaggctggcggaaattgcccgtacctgggaactggaaaaagatgaagtgataagcccattgccagtttatgccagtacctttgaaggctggaactcccctgaacgtagaaccttcccactgcaactgtttggtttccattacaaatcccgtactcacagcacctacggcaatattgatctcctgaaggctgcctgccgtcaggaggtgtggatcaaccctatagatgcgcagaaacgtgggattgccaacggcgatatggtgcgggtgtttaaccatcgtggcgaagttcggctaccagccaaagtaacaccacgtattctccctggagttagcgctatgggccagggagcctggcacgaggccaatatgtctggcgataaaatcgaccatggcggctgtgtgaatacgctaaccactctgcgccctagtccactggcgaagggaaacccgcagcacactaatctggtcgagatcgaaaaaatataacccacgacaaccataaattctggcatgacattttgtttgaaaagcaataagtgagtaatgatgaaaatccataccacagaggcgctcatgaaggctgaaatcagccgtagaagtctgatgaaaacctccgcacttggcagtcttgcgctggcaagcagtgctttcactctgccattttcccaaatggtccgggcggcagaggctccggtagaagagaaagcggtctggagttcctgcaccgttaactgcgggagccgctgtctgttacgtttgcatgtgaaagatgacaccgtgtactgggtggagtctgatacgacaggtgacgacgtctacggtaatcatcaggttcgagcgtgtttacgcgggcgctctatccgccgacggatgaatcatcctgataggttgaaatatcccatgaagcgcgtcggcaagcgcggtgaaggtaaatttgaacggataagttgggacgaagccctggataccatcagtgataatcttcggcggatcctgaaagattacggcaatgaggctgtacatgtcctgtacggaacaggcgtagatggcggaaacatcaccaacagtaacgtcccgtaccgtctgatgaactcttgcggtggttttctcagtcgctatggcagctacagtaccgcacagatcagtgccgcaatgagttatatgttcggtgccaatgatggcaacagcccggatgatatcgccaatacgaaactggtcgttatgttcggaaataacccggcagaaacgcggatgagcggcggtggtgtcacttactacgtcgagcaagcccgcgaacgtagtaacgcacgcatgatcgtcatcgatccacgttataacgacactgctgccgggcgtgaagatgaatggctgcccattcgccctggcaccgatggcgcactggcctgtgcgattgcctgggtactgattactgaaaacatggtcgatcagccatttctcgacaaatattgtgttggttacgatgaaaaaacgctgcccgccaacgcaccacgtaacgcgcattataaagcctatattctgggcgaagggcctgacggcatagctaaaacgccggaatgggcagcaaaaatcaccagcatcccggcagaaaaaattatccagttggcacgagagatcggtagtgcaaaacctgcttatatttgtcagggttgggggccacaacgacattccaacggcgagcaaacatcccgcgctattgccatgctttccgttctcaccggcaacgtcggcataaacggcggcaacagtggcgtacgcgaaggtagctgggatctgggggtagaatggttcccgatgctcgagaatcctgttaaaacgcagatttccgtctttacatggacagatgccatcgaccatggtacggaaatgaccgcgacccgtgatggtgttcgtggaaaagaaaaactggatgtccccatcaagtttttatggtgctacgccagtaacacattgatcaatcaacatggcgacatcaatcacacccatgaggtgcttcaggatgacagcaagtgcgagatgattgttggcattgaccacttcatgacggccagcgctaagtattgcgatatcctgttgcccgacctgatgccaacagagcaagaagaccttatctctcatgaatctgcagggaatatgggctatgtgatcctcgcccaacccgcaaccagtgcaaaatttgaacgcaaacccatctactggatgctgagtgaagtcgccaaacgcttaggaccagacgtttatcaaacctttactgaaggtcgcagtcagcatgaatggatcaaatatctccatgcgaaaacgaaggaacgtaaccctgagatgcccgactacgaggagatgaaaacgaccgggatctttaagaaaaaatgcccggaagaacactacgtcgctttccgcgcattccgtgaagatccacaggcaaacccgttgaaaacacctagcgggaaaatcgaaatttattctgaacgactggcgaagattgcagatacctgggaattgaaaaaagatgaaattattcatccccttcctgcgtataccccaggttttgatggctgggacgatcccctgcggaaaacctatccactgcagttaacgggcttccattacaaagcgcgtacccactccagctacggcaatattgatgtgttacagcaggcctgcccacaagaggtgtggatcaaccccattgatgctcaggcacgcggtatccgtcatggcgataccgtgcgggtatttaacaataatggagaaatgctgattgccgcaaaagtgactccgcgtattctgcctggcgttaccgccatcgggcaaggtgcgtggcttaaagcggatatgtttggtgaccgggtcgatcacggcggcagtatcaatattctgacctctcaccgccctagtccgctggcaaagggaaacccgagccacagcaatcttgtccagatcgaaaaggtttaaggagtagcccatgaccacacaatatggattttttatcgattccagccgctgtactggctgtaaaacctgcgaactggcgtgcaaagattttaaagatcttggcccggaagtcagtttccgccgtatttatgaatacgctggcggcgactggcaggaagataatggcgtctggcaccagaacgtgttcgcttattatctctccatctcctgtaaccattgcgatgaccccgcatgtacaaaagtctgccccagcggcgcaatgcataagcgtgaagatggctttgtggtggttgatgaagatgtttgtatcggctgccgctactgccacatggcttgtccgtacggcgcgccacagtacaatgctgaaaaagggcacatgacgaagtgcgatggttgttatagccgcgtcgccgaggggaaacaacccatatgtgtcgaatcctgcccgctgcgtgcacttgagttcggtccaattgaagagctgcgccagaagcacggcactcttgctgccgtcgcgccactgccgcgcgcgcatttcacaaaacccaatatcgttatcaaacctaacgccaacagccgcccgaccggcgataccactggttatctggctaatccggaggaagtgtaaaatgggaaatggatggcatgagtggccactggttatctttaccgtattgggtcaatgcgtagtaggcgcgctgattgttagcggaattggctggttcgccgccaaaaatgacgcagaccgtcagcgtattgtccgtggcatgtttttcctctggctgttgatgggcgtcgggtttattgcctctgtcatgcacctgggaagcccactgcgggcgtttaactccctgaatcgaatcggagcttctggtctgagtaacgagattgctgccggttccatattttttgccgttggcggattatggtggctggtggcagtcatcggtaaaatgccgcaagcgttggggaaactctggttacttttcagcatggcgctcggcgtcattttcgtctggatgatgacctgcgtgtatcaaatcgacaccgtgccaacctggcataacggttacactacgctggctttcttcctgacggtattgttgagcggtccaatacttgctgccgcaattctgcgggcagctcgcgttacatttaataccacaccatttgccatcattagcgttctggcgctgatcgcttgtgccggggtgattgtgctgcaaggtttgtctctggcgtctattcacagttccgtgcaacaagccagcgcactggtaccagattacgcctccttacaggtctggcgtgtggtattgttatgcgcaggtcttggatgctggctttgcccgctcattcgtcgccgtgaacctcacgttgccggacttattctggggctaatcctcatacttggcggtgagatgatcgggcgtgtgctcttttatggcctgcacatgacagtaggaatggctattgcaggttaacaaattggtgcggggcaacccgcacatttcaggatgttaggaatgacccattttagtcagcaagataatttttctgtcgcggcgcgcgtgttgggcgcgctgttttattacgctccagagagtgcggaagccgcacctctggttgcggtactcaccagtgacggctgggaaactcagtggcctctaccagaagcgagtttagcgccgctggtgacggcttttcagacacagtgtgaagagactcacgcccaggcctggcagcgtttgtttgtcggcccgtgggcactgccgtctccgccgtgggggagcgtctggctggatcgcgaatctgtgctgtttggcgatagtacattggcacttcgtcagtggatgcgcgagaaaggcattcagtttgaaatgaagcaaaacgaaccggaagatcattttggtagtctgctgttgatggctgcgtggttggcggagaatggtcgccagacagaatgcgaagaattgctggcatggcacctttttccgtggagtacacgttttcttgatgtttttatcgaaaaagcagaacaccctttctaccgtgcactgggtgaactggctcgcttaacgctggcgcaatggcaaagtcaactgttaattcctgtcgcggttaaaccgctgtttcgataagatcaccgtaatattgccggatggtgacgattacgcgcaatccggcaataataggttacagtgtcacgtttttttatctcttaaagcacgcactgcttttgcggctggcctcttttgccgcaaaatagtcgcccgtgtttcattgcccatttctgctcatgcatcatctacacatctatccggatctgcgcactatgttccaccgtctgcttatcgcaacagtcgtcggtattctcgcggcctttgccgttgccgggtttcgtcatgcgatgctgctactggagtggttgttcctcaataatgactccggcagtctggtcaatgcagcgacaaacctttccccctggcgacggttgctaactccggcgctcggcggactggcggcgggtttgttgctgatgggctggcagaaatttacccaacaacgccctcatgcgccgaccgattatatggaagcgttgcaaaccgatggacagttcgattacgcagcaagcctggttaaaagccttgcctctctgctggtagtaaccagcggcagtgcaattggtcgcgaaggtgcgatgattcttttagctgcccttgccgcctcctgttttgcccaacgttttacgccacgccaggagtggaaattatggatcgcctgtggggccgcggcgggaatggctgcggcctatcgtgccccgcttgctggcagtttatttatagccgaagtgctgtttggcactatgatgttggcctctctcggcccggtgattatttccgccgtcgtggcattgctggttagcaatctgattaatcatagcgacgcgttactctacaacgtacaactcagtgtgacggttcaggctcgtgactatgcgctgattatcagtacaggtgtgctggcaggtctgtgcggaccactgttgttaacgttaatgaacgcctgtcatcgtggatttgtgagtctcaaacttgcgccgccctggcaactggcactaggcgggttgatcgtgggtctgctttccctgttcacacctgcagtgtggggcaacggctatagcaccgtacaatcctttttaaccgccccaccactgttaatgatcattgccgggatcttcctttgtaaactgtgtgccgtgctggcgagtagcggttccggcgcacccggtggggtctttacaccgacgctatttatcggtcttgccattggcatgttgtatggtcgtagcctgggattatggttccctgatggcgaagaaattacacttttactcggattgaccgggatggcgacactgttggcggcgaccacgcacgcgccgattatgagcacgttgatgatatgtgaaatgaccggggagtatcagctactccccggtttattgattgcctgcgtaattgcgagcgtaattagccggacgttacaccgtgactctatctaccgccagcacactgcgcagcatagctaagcggatgtattgccccagttcacgctgttcggcgcgcggcagataaggcagttcaccaatgagcggtgccggaagttttttacccagcacatcaatgatttccgcataatgcgccagtcctgggttgattcggttagccacccagccaatgagcggcagcccgtcgttggcgatcgcctgagctgttagcagtgcatggttaatgcaaccttcctgaataccgacaaccatcaacaccggcagttgttcctgcactacccattcagagagtggacgcaaatcattcatcagactgcgccagccgccagtcccttctaccacgacatgatcgactttttcggtcaggtttgccaggccgttactaatgagggtgtaattgattgggcaactgtgcgccacgctactttcttcttcgcttaacgcgataggattaactgcttcataaggcagttcgatggtactaacactctgcaacaccagggcatctttattacgcagcccttcgggtgtctctttgctccccttcgctacgggtttatatcccgcaaccgtttttccctgggaggctaacgcttgtagcaatgcgcgggaaaccaccgttttccctacagaagtgtctgtaccggtaataaagaaacgcttcagcatcactaactccaccgttatgcttcacaaatataaaccaggaaaataattaaccttgaaagtctaagttatgctttcctggcccaaattgagatagcgcaaattttggtagaacagttaaaaaatgttaaccctgcaacagacgaatcaacaaagaaccgttatacatcgcgtcttttaccagtgcagcgcctgccatcgtgccctggttagaaaactgagtactctcaacgctgatgtgctgactatacgcaggaagggcctgctgacggatgctgtcactgatgaccgggaagaggatatctgccgctttacttaacggactgccaatcagtattttttgtgggttaaataaattcaccatgatggcaagaatgcgcccgacatgcgcgcccaccccggtaatgatgtcttttgccagtagatcgccgcgcaatgccgcctgacacaaactgtccacggttaacggttgtccatgtaacatgctgctcatggattgattaagacgcagctgtgccagctcaagaatactgtccacgctggcgatggtttcgaggcagccgtgattcccgcaataacagcgtttcccatacgggtcgacctgtgtgtggcctatttccacgagactactgctgcctgcgtgtagcagatgaccatcggtaatgacgcccgcccccacgttgtgatcgataaccacctgaatcacatcgcgcgccccgcgactggcaccaaacaaggcctctgccatcgtccatgcgctgatatcatgctgaatataaaccggaacgccggtatgctgctccagcgcctcgccgagcggcatctcttttacatcctcgtagaacggcatgcgatgtacaataccattttccgtatcaataattcccggcaaggttatggcaatgctagttagacgctcaagttttttctggtggcggataaaaaactgatcgatatgggaaataatacgatccagcaatggcaagtcatcttttaacgccagttcctggctctcttccaccaccagtttgctgctcagatcgcgcagagcaaggaaaatctccccgcgactaatgcgcagagaaagatagtgccaggcttcagtttcaaccaccagccccaccgccggacggccacggttccccgcttctttgatttccagctcttgcaccaggtgtgcttcgagcatctcacggacaattttagtgatactggcaggagccagttgcgccagacgggaaagatcgatacggctgactggaccaagctgatcaatcaggcgataaaccgcgcccgcgttggtctgctttatttgatcaatgtgcccaggctggttttcagcaaccaccgcatactccctatattttcgcgctccgaaataatctgtaggctatggtgaagcacttcaatacgtgtcgtcaaatttttacttaggcatgtgattaacagcacatttttcgggctttttcgctgaaatttccctcacctgagagcattcagcagatgaatacgaaagttacgcgcagccggactttgttcatgatgtttcggccagaccaaccacatttcagaaaccgcatcctcttcagcaatcggcacccagcgcatttcgttgagctgaacacgtttaaaactcgcaggcaaaatactaacacccagaccggcggaaaccagaccgatgatggtcattgcctcgcccacctcctgagtgatgacgggcgtcaaatggtaacgtcgcatcagcccgagaatatcgtcatacagccctgtcccgacgtgcggatcaaaaaagacaaagggttctttcgccagttcagccagcgttacattcgggttatttgccaggggatgatcgtgcgggatcatcgccataagcggttcatggacgatgactgcgtgttcaaggctctccggtaacgctgtgttacgcagcaatcccatatccagcgttccttcaatgagcggagcgatttgctcgcgagtgttcatttcgcgggtttgtaaatggacatcaggataatcacggcgaaacaggcttaacgtatcggacaccgcccgaataaaaggagcgctgctagtaaaaccaatgcgcaactcccccgcttcaccctgatgcagcctttcagcgcgagcggcagcgtcatccaccatagacaggatttgccgactatctgcaagaaactgttttcctgctgccgtcagcaatacactgcgattggttcgtgccagcagtcgggcaccaatttgttgctccagcgcctgaatctgctgacttagcggcggttggctaatattcaggcgggcagcggcgcgcccgaaatgcagctcttccgcaacagcaacaaagtaacgcagatgacgaagttcaatattcatatttaaaacatcttatttgagattattaatatattagacagaacaattcgattttcctaccctatgtataagcctgatctacaggcatatttagcaaggatttcaagtgagccgtactacaactgttgatggcgctccggcaagcgacactgacaagcaaagcatttctcagccaaatcaatttattaaacgcggtacgccgcaatttatgcgcgtcaccctggcgctgttctctgccggactggcaacatttgcacttctctattgtgtgcagcctatccttccggtgcttagccaggagtttggcttaacccccgcgaacagtagtattagtctgtccatttccacggcgatgttggctattggtttgctgtttactggcccgctatccgatgccattggtcgcaaaccagtgatggtcacggcgctactgttggcctccatttgtacgttacttagcacaatgatgaccagctggcacggcattttgattatgcgcgccttgattgggcttagcttaagtggcgtggcagctgttggcatgacttatcttagcgaggaaatccatcccagtttcgtggcctttagtatggggttgtatatcagcggcaacagtattggcggcatgagcggacgcttaattagcggtgtcttcacggactttttcaactggcgaattgctctggcggcaatcggttgtttcgcgctggccagcgcgttgatgttctggaaaatcctccctgaaagtcgccattttcgcccgactagcctgcgccctaagacgttgtttatcaactttcgtctgcactggcgtgaccggggattaccgttattgttcgcagaaggctttttgctgatggggagcttcgtcacgctgtttaattacatcggctatcggttgatgctctccccctggcatgtcagtcaggccgtggttggcttattaagcctggcttatttgaccggtacatggagcagtcccaaagccggaaccatgaccacccgctatgggcgtggtccagtgatgttgtttagcacgggggttatgctgtttggtttactgatgaccttattcagcagcctgtggctgatctttgccggaatgttactcttcagtgcaggattcttcgcagcccacagtgtagccagcagctggatcggcccccgcgcaaaacgcgctaaaggccaggcctccagcctgtatctgttcagttactatctggggagcagtattgccgggacgctgggtggtgttttctggcataactatggctggaacggcgtcggcgcatttattgctctgatgctggtcattgctctgctggtcgggacgcgtttgcatcgtcgtctgcacgcctgaaaaataagtccggactgcggtaaatacccgtccggacttattgccagctcaaaccaacgttaatagccatcctaaaatagacgaagcgccagccaattcccgcagcgcgtctagcgtcatcaggattataagtacccaaataaacggattcattttgctgtgtgtcatttattactgatgcgcagttattctactgctttgtaagtagtaaaatagttaacccgatcaagactactattattggtagctaaatttcccttaagtcacaatacgttattatcaacgctgtaatttattcagcgtttgtacatatcgttacacgctgaaaccaaccactcacggaagtctgccattcccagggatatagttatttcaacggccccgcagtggggttaaatgaaaaaacaaattgagggtatgacaatgaaaaaagtattagctctggttgttgccgctgctatgggtctgtcttctgccgcctttgctgcagagactacgaccacacctgctccgactgcgacgaccaccaaagcagcgccggcgaaaactacacatcataaaaaacagcataaagcagcacctgcccagaaagcgcaggcggctaaaaagcatcataaaaatacgaaagctgaacagaaagcccctgaacaaaaagcgcaggcagcgaagaaacacgccaagaaacacagccatcagcaaccggcaaaacctgctgcacaacccgcagcgtaagttttcaacagtaatgctggcgcgccccctcgcgcctgaaaattacggtgctaagcgggtaacgtttagcaccgcctttagcggagggtagtatggtgggccgttatcgctttgagttcattctgatcatccttattttatgcgcactgattaccgcccgtttttatctttcctgattgtagttatctgattttactcccactttcatcccgtcccgtctatagtatttatgagggtttgcttttaataatcataattacccaccagagtgtgatatgcgtacaaccattgctgtagtgttgggtgcaattagtttgacgtctgcttttgtgtttgcagataaaccagacgttgccagaagcgcaaacgatgaggtcagcaccctgttttttggtcatgatgatcgtgtgccagtgaatgacacgacccaaagtccgtgggatgcggttgggcaactggaaacggccagcggcaatttatgtacggcgacgctgattgcacccaatctggcattaacggcaggacactgtttattgacacctccaaagggtaaagccgataaagcagtggcgctgcgttttgtgagtaataaaggtctttggcgctatgagatccacgacatagaaggccgcgttgatccgacactgggaaagcggttaaaagcagatggggatggttggattgtacctcccgcagccgcgccgtgggacttcggattgattgtgctacgtaatcccccttctggcattacgccgttgccgttatttgagggagataaagccgcgcttaccgccgcattaaaagcggcaggtcgtaaagtgactcaggcaggctaccctgaagatcatctcgatacgttgtacagtcatcaaaactgtgaagtgactggctgggcgcaaacgagcgtgatgagtcatcagtgcgataccttgccgggtgacagcggtagccctctgatgttgcataccgatgacggctggcaattaattggggtgcaaagtagcgctcctgccgcgaaagatcgctggcgcgccgataaccgggccatttctgttaccggttttcgcgacaagctggatcaactgagccaaaaataatgttcaaacgctgcccgacagcgcgggcagcgtcttcatcaggcaagtttcaccatgatcattccagccaacagcaagaccaggccaatccagcctttacgatttaaccgttgaccaaacaagatccaacctgcggctaacgtggcggcaataccaaacccgccccacaatgcataagcgacagacaagtcgatccctttaacggcttgagaaagcgcactaaaggcagccagcaccgccgccagggagagcaagccaaatattttgcgacgaaagccgtcagaaaatttcaaaaagacgttagcaacgatttccagcacgattgccaatgccagccaggcggcgtgaacccattcaaactgcgccatggttcacctccagttcaggtttacgcgctttacgggtaccactttttatcaacacaatcccggcgaccagggtggttaacccggcaattttcatcaggcttaaactttcgtcgaataacaaaacgctaaacaaggtaataaataaaataccgataccttcccacagcgcataagctacgcctaaggcgatttttttaacggcgaaagagagaaatatatagctcagagaaatcatcaccagcattaaaataaagccgccatttccctcactgacgctcgcccatttcatactcagcgtaccggtaatttctgtagcaatagccagacctaataaaatccaataaatatacattgtccttctcctgcaagagaattattttaattttcgcttaattcagcgaaaccaaagtaaagtggtcaagccccgcgcatagcgcaagctttggcagaagaaaggactaaagcgcgttgcgccagtgctgctcacctacgagcaagatagtggatgaggtacgaagatgggtaaatgtagaaaataacgtcctgaacaaattgtccataatattacaattatccgcagtgttgcttctcgtcatcgcggatgataattgtcctcggtagttgaacacgcctgatttgtatcatagcttaagaattaactcaaaatattttcacttctttacctgagcggtttgattttcgttatgatgacggagcgaaaaagacattattattagcaaaggaagaaaaaacggggacaagcatggcaaagccgatcatcacgctcaatggcctaaaaatcgtcattatgttgggaatgctggtcattattctctgcggtatccgttttgccgccgagatcatcgtgccgtttattctcgcattatttattgctgttattcttaacccgctggtgcaacacatggtccgctggcgtgtgccgcgtgtactggcggtgagcattttgatgaccatcatcgtgatggcgatggtgttgctattagcttatctgggttccgcgctcaacgagttgacgcggacgttaccgcaatatcgcaactctattatgacgccgctgcaagcgcttgaaccgttgttgcaacgcgtagggattgacgtcagtgttgaccagctggcgcattatattgatccgaacgcggcgatgacgttgctcaccaacttattgacgcagttatctaatgccatgagtagtatatttttattgctgctgacggtgctgtttatgctgctcgaagtgccacaattgcccggaaaatttcagcaaatgatggcgcgtccggttgaagggatggcggcgattcaacgtgcgattgacagtgtttctcattatctggtgctgaaaacagccatcagcatcatcaccggcctggtcgcctgggcgatgctcgccgcactcgatgttcgcttcgcttttgtctggggattgctggcctttgcgcttaattacatcccgaatattggtagtgtcctcgcggcaatcccccctatcgctcaggtactggtgtttaatggcttctacgaagcgttgctggtgctggcgggatatctgctgattaatctggtcttcggcaatattctggagccgcgtatcatggggcgtgggctggggctttccacattggtggtatttttgagcttgattttttggggatggttgttaggaccggtgggtatgctgctttccgtgccgttgacaattattgtcaaaattgcgcttgaacaaacagcgggaggtcaaagcatcgccgttctgttaagcgatctcaataaagagtgacggcctcagcagaggccgtcagggttacagagctttcaggattgcatccacgctggctttggcgtcaccaaacagcatgtgggtgttttccttgaagaacagcgggttttgcacaccagcatagccagtgttcatgctacgtttaaagacaatcacgttctgcgctttccacacttccagcacaggcataccagcaatcggactcttcggatcatcctgcgccgccgggttaaccgtatcgttagcaccaatcaccagtacggtatcggtatcagcaaagtcatcattgatctcgtccatttccagcacgatgtcatacggtacttttgcttcagccagcaatacgttcatatgtccaggcaaacgccccgcgaccgggtggataccgaaacgcacattaataccacgagcgcgcaatttctcagtaatttcagcgacaggatattgcgcctgcgcgactgccatgccgtaccccggagtaatgatcacactatgggagtttttcagcagttccgctgtctcttctgcggtgatttcgcggtgctcacccacttcctgatcatcgccagtagaagagccgtcggtgccgaaaccacccgcaataacgctgataaaggaacggttcatcgccttacacataatgtaagaaaggatagccccgctagaaccgaccagcgcaccggtcacaatcagcaggtcgttgctgagcataaagcccgcagccgcagccgcccagccggagtagctgttcagcatgctcaccaccactggcatatctgcaccaccgatggaggcgactaaatgccagccgaataccagcgcaattgcggtcattatcagcaatgccagcacttgcaggccgacgctgtccgtgcgaacaaatacaatcagcagcaggaaggaaacgaccagagccgccaggttcattttgtgacggtttggcagcatcaatggtttagagctaatcttgccacacagtttgccgaacgccaccacgctacccgtgaacgttaccgccccgatgaagataccgaggaacacttccgtcaggtgaatattgaccagaatcggtgccattcccgcgtcatgatgcagatagctgttaaagccaaccagcactgccgccagacccacgaagctatgcaggatcgccaccagttctggcatttcggtcatttcaactttcttcgccagacggataccaattgccccaccaatgaccatcgccagcaagatccagccaacattacccgtatccggtccaaaaatggttgcgattaacgcaatcgccatcccggcgataccgaagttgttaccctggcgagacgtttcatgtttgctaagaccggccagactgaagataaacaggatcgcggcaacaatgtatgcagctgtaactaatcctccagacatatgttaccccttaatttttgcggaacattttcagcatgcgctgagtcacggtgaagccaccgaaaatattaatgctggctataagcaccgcgataaaactaaggaagctaacccagccgccctggccaatctgcaacagtgctccgacaacaataatcccactaatcgcgttggtgacgctcatcaacggtgtatgcagcgcgtggcttacattccacaccacgtaataaccgacaacgcaggccagcgcgaaaacggtgaagtgcccaaggaattctttcggcgcaacgcttgccatccagccaaaaagaatgattgccagcgccatcaacgcgtatttacgccacggactgcaggtacatttttcctcagttttcacttccggtgccgctttttgtgccgcctgcggctgagcacttacctgaatcggcggtgccggccaggtaatttcgcccgcacggatcacggtcacgccgcgaatcaccacatcatcaaaatcaacagtgatattgccgtctttctctttgcacaacagtttcagcagattaacgaggtttgtgccgtaaagctgactggattgcgtcggcagacggcccggaagatcggtataaccaatcactttgacaccattttccgtagtgaagatttcacccggcacggtgtattcacagttgccgccgttttgggctgccaggtcgacaatcacactgcccgccttcatggagtcaaccatttcacgggtaattagcttcggcgctggtttgcctggaataagcgcggtggtgacaatgatatcgacctcttttgcctgggcggcaaagagttccatttccgctttgatgaacgcgtcgctcatcactttggcatagccatcgccgctgccagcttcctctttaaaatccagctcgaggaattccgcgcccatactttgaacttgttctttcacttccgggcgggtgtcgaatgcacgcacaatcgcgccgagactgtttgctgcgccaatggcggccagacctgcaacacccgcaccaatcaccatcacttttgccggtggcactttcccggccgcagtaatttgcccggtaaagaagcgcccaaattcatgtgccgcttcaacaatggcgcgataaccggcgatgttcgccatgctgcttagtgcgtccaggctttgtgcgcgactgatacgcggcacagagtccatcgccatcacggtcacgttacgttccgcaagtttttgcattaattccggattctgcgcaggccagataaaactcaccagcgttgtcccaggattcagtaacgcaatttcatcatctaacggcgcattgaccttcagaatgatctcactctgccagacgctattcccttctacaatttcagcgcccgcttgcacaaacgctttatcgtcaaaacttgccagttgacccgcgccgctctctaccgcgacggtaaaacccagtttcagcagctgttccactgtttttggcgttgctgcaacacgggtttcattggttaaccgttctcttggtatgccaattcgcatgatattcccttccatcggttttattgatgatggtttgcctgtgtcaggagccacacaagctgctcatgtacgagctaaatgttactccgttaaaataaattagtaacaaacgccctataacgtactgaaaattatgcctgtgatctagcgccaaaaatcagtatttcggcgtgaactcgcaaaatattaacgattcagccgtgatagtgggataaacaccttagaacgccggataaagactgataattgtcttcgacggtcgggtaaaacgagacatcgccccggcacgaatcactacttaacattaaattaacttatacaattcagttgcttcagtagtaatgatgctgatacggctgttttttaagcatagacggtcatttgagcaggattaaaattggcttaaggaatgtgatatgaaaaatgacgcagacagttacaccgtttaaatgcaataatcagccacgtttctcgttaataacaataccagtacctggtttgcgcaaggcgaaggattatttttatgaagcttaagaacaccctcctggcgagcgcactgctttctgctatggcattctccgttaacgcagcaacagaactgacaccggagcaagcggcagcggttaaaccttttgaccgtatagtggttaccggtcgttttaatgctattggcgaagcggtgaaagccgtttctcgtcgcgcagataaagaaggtgccgcctctttttatgttgtcgacacttctgattttggtaacagcggtaactggcgtgtggtcgctgacctctataaagccgatgctgaaaaagcagaagaaacaagtaatcgcgtaattaacggtgttgtcgaactgccgaaagatcaggctgttctgattgaaccgtttgacacggtcaccgtccagggcttctatcgtagccagccagaagtcaatgatgccatcaccaaagcggcaaaagcgaaaggtgcctactctttctacatcgttcgtcaaatcgatgccaaccagggcggcaaccagcgtattactgcattcatctataaaaaagatgctaagaaacgtatcgtccagagcccggatgtgatcccggcagattccgaagcaggacgtgcagctctggctgccggtggcgaagccgcgaagaaagttgagatcccgggtgttgcgactaccgcaagtccaagttctgaagtcggtcgcttctttgaaacccagagtagtaaaggcgggcgttacaccgtcacgctcccggatggcactaaagtcgaagaactgaacaaagcgaccgcagcgatgatggtcccgttcgacagcatcaaattctctggcaactacggcaacatgaccgaagtctcctatcaggttgcgaaacgtgccgcgaagaaaggtgctaagtattaccacatcacccgccagtggcaggaacgtggtaataacctgaccgtcagcgcagatctgtataaataactattcagttactcctataaggcggcttgatgccgcctttcgcatttttagtcacaaatttccccgcgaccattgcatgcagacacatctcttcgtaaaatcccgcgcttcagtggcaaactccatttttatgcgttttgccctaatatttattcttcttatcacgttttaatcactggatatcgatggaaaagaaactgggactgagcgcactcaccgcgctggtattaagcagtatgctgggcgcgggtgttttcagtctgccgcaaaatatggcggcagttgccagcccggcagcactgctcatcggctggggtattactggcgctggcattttattgctggcctttgccatgctgatcctcacgcgcattcgtcccgaacttgacggcggtatctttacctatgcccgcgaagggtttggcgagctaatcggcttttgttccgcatggggatactggctgtgcgcagtcatcgccaacgtctcctatctggtgatcgttttttccgcgttaagcttttttacggacacgccggaattgcgcctgtttggcgatggtaatacctggcaaagcatagtcggtgcaagcgctttattgtggattgttcactttttgatcctgcgcggggtgcaaaccgctgccagcattaacctggtggcgacactggcaaaattgttgccgctgggtctgtttgttgtgctggcgatgatgatgttcaaactggataccttcaagctcgacttcaccggacttgcacttggcgtacccgtttgggaacaggtgaaaaacaccatgctgatcaccctgtgggttttcattggtgtggaaggtgccgtggttgtttctgcgcgtgcgcgtaataaacgtgatgttggcaaagcgacactgctggcggttctctccgctctgggcgtttacttgctggtaacgctgcttagcctgggtgtggtggcacgtcctgaactggctgaaattcgtaacccgagtatggccggtctgatggtggaaatgatgggaccatggggcgaaatcatcatcgctgccggtttgatcgtttccgtttgcggcgcgtacttaagctggaccatcatggcagcagaagtaccgttcctggccgccactcataaagcattcccgcgcatttttgcgcgccagaacgcacaagctgcgccatccgccagtctgtggttgaccaacatctgcgtgcaaatttgtctggtactcatctggctgaccggttccgattacaacacgttgctgaccatcgccagtgaaatgattctggtgccctatttcctggtcggcgcgttcttgctgaaaatcgcaacccgtccactgcataaagcggtaggtgtcggtgcctgcatttatggcttatggttattgtacgcctctggtccaatgcacttgctgttatccgttgttctgtatgcaccggggctgctggttttcctgtacgcgcgcaaaacgcatacccatgataatgtactgaaccgtcaggaaatggtgctgattggcatgctgttaattgccagtgttccggcgacctggatgctggtgggataacgttcatcccatcgttggatagcaaaggagataacgatgggtaaaacccagcccttgccaatattaattactggcggaggtcgtcgcatcggcctcgccctcgcatggcatttcattaatcaaaagcaaccggtgattgtcagctatcggacacactatccagccattgatggactgattaatgcaggtgcgcagtgtattcaggctgattttagcaccaacgacggtgtgatggcgtttgccgatgaagtactaaaaagcacccatggtctgcgtgctattttgcataacgccagtgcgtggatggcggaaaaaccgggtgcgccactggccgacgtactggcttgcatgatgcagatccacgttaataccccatacctgctcaaccatgcgctggaaagattactgcgtgggcacggacacgccgccagcgatatcattcactttaccgattatgtggtggagcgcggtagcgacaaacatattgcgtatgctgcaagcaaagcggcactggataatatgacccgcagctttgcccgcaagctggcaccggaagtgaaagtgaattctattgcgccaagcctgatcctgtttaatgaacatgatgatgccgaatatcgacaacaggcgctgaataaaagtctgatgaaaaccgcgcctggcgagaaagaagtgatcgacctggtcgattacttacttaccagttgctttgtcaccggacgcagtttcccacttgatggcggtcgtcatctgcgttaatgcagctttatccagcatataatcaacacccatgcgcttatcccccaacacgcaacagaaccaacaaaagcggcgggcaagcgcatcattccggtgaaataccacaggctcaccaggtaaacaaaatagggaataatgctccacatactaaaaatgatggttgcgcgtaaggcttcaatgccgcgttcgctggcaacaatataatgcgcgataagcgcaaaggtcgggaaaagtggaatcagcccggcgatataataatttttcgtttttgctaaaacaccaatcaacagcactaccagcgcaccgagcgcggctttgattaccagccccatctttttaccttaacacttccataacaagtcatcagtagaatacctgatgaaaacttgtttagaaacgattgatagtaagtaaaaacagcgcggtgtattgtgacgtttttatatctaccgtgaatgttatgaacactatcgtatttgtggaagatgatgcggaagtcggtagtctgattgccgcgtacctggcaaaacatgatatgcaggttaccgtagagccgcgcggcgaccaggccgaagaaaccattttgcgagaaaatccggatttggtgttactcgacatcatgctaccaggcaaggacggcatgaccatttgtcgtgatttacgcgcaaagtggtctggaccgattgttcttctaacctctctcgatagcgatatgaaccacatcctggcactggaaatgggtgcctgcgactatattctcaaaacgacgccccctgctgttttgctagcgcgtttacgtttgcatttgcgtcagaatgagcaagccacactgaccaaaggtcttcaggaaacgtctctgactccctacaaagccctgcatttcggcacgttgaccatcgatcccatcaaccgcgtagtcaccctggctaacactgaaatcagcctcagcacagctgatttcgaattattgtgggaattagctacccatgccgggcaaatcatggaccgcgatgcattgctgaaaaatttacgcggcgtcagttatgacggactggatcgtagcgtggacgtggctattagccggttaagaaaaaaactgctcgataacgccgcagaaccttatcgcattaaaactgtgcgtaacaaaggctatctttttgcgcctcatgcatgggaataagcgatgaaaaaactgtttatccagttttacctgttattgtttgtctgcttccttgtgatgtctctgctggttgggctggtgtacaaatttaccgccgaacgcgcgggcaaacagagcctggatgatttgatgaacagtagcctgtatctgatgcgcagcgaattgcgtgagatccccccacacgactggggtaaaactctgaaagagatggatttaaatctctctttcgatctgcgtgtcgagccactgagtaaataccatcttgatgatatttccatgcaccgactgcgtggcggcgaaattgtcgccctggacgatcagtacacgtttttgcagcgtatcccgcgcagccactacgtgctggcagttggtcctgttccttatctttattatctccatcagatgcgattgctggatatcgccctgatcgcttttattgctatttccctcgcctttccggtgtttatctggatgcgtccgcactggcaggatatgttaaaactggaagcagcggcgcaacgatttggcgatgggcatctcaatgaacgtatccactttgatgagggtagcagctttgaacgacttggcgtcgcatttaaccagatggcggacaatatcaacgccttaattgccagcaaaaaacagcttattgacggtatcgctcacgaactgcgaacaccgttagtgcgcctgcgttatcgactggagatgagcgataacctgagcgccgccgaatcccaggcgttgaatcgtgatatcagtcaacttgaagctttaattgaagagctgctgacttatgcccgactcgatcgcccacaaaacgagcttcatcttagcgaaccagacctgccgttgtggctgagtacgcatctggcagatattcaggcagtaacgcccgataaaacggtacggataaaaacgctcgtgcaaggccattatgcggcgttggatatgcgcttaatggagcgcgtgctggataatttgctcaataacgccctgcggtactgccatagtacggttgaaaccagcctgctactgagcgggaatagagcgacattaattgttgaggatgatggcccagggattgccccagaaaaccgcgaacatatctttgaaccttttgttcgcctcgatcccagccgggatcgcagtaccggcggctgcgggctggggctggcaattgtccactctatagcactggcaatgggcggtacggttaattgtgacaccagcgaactgggtggtgcccgcttcagctttagctggccgttatggcataacatcccgcaatttacctctgcctgacactacgcgcacgatggtcaagtcaccacgactgtgctataaaataagtatgttgtaactaaagtggttaatattatggcgcgttacgatctcgtagaccgactcaacactacctttcgccagatggaacaagagctggccatatttgccgctcatcttgagcaacacaagctattggttgcccgcgtgttctctttgccggaggtaaaaaaagaggatgagcataatccgcttaatcgtattgaggtaaaacaacatctcggcaacgacgcgcagagcctggcgttgcgtcatttccgccatttatttattcaacaacagtccgaaaatcgcagcagcaaggccgctgtccgtctgcctggcgtgttgtgttaccaggtcgataaccttagccaagcagcgttggtcagtcatattcagcacatcaataaactcaagaccacgttcgagcatatcgtcacggttgaaagtgaactccccaccgcggcacgttttgaatgggtgcatcgtcatttgccggggctgatcacccttaatgcttaccgcacgctcaccgttctgcacgaccccgccactttacgctttggttgggctaataaacatatcattaagaatttacatcgtgatgaagtcctggcacagctggaaaaaagcctgaaaagtccacgcagtgtcgcaccgtggacgcgcgaggagtggcaaagaaaactggagcgagagtatcaggatatcgctgccctgccacagaacgcgaagttaaaaatcaaacgtccggtgaaggtgcagccgattgcccgcgtctggtacaaaggagatcaaaaacaagtccaacacgcctgccctacaccactgattgcactgattaatcgggataatggcgcgggcgtgccggacgttggtgagttgttaaattacgatgccgacaatgtgcagcaccgttataaacctcaggcgcagccgcttcgtttgatcattccacggctgcacctgtatgttgcagattaacgcccggctttcatactgccgaccatctgttctggccgtacccagctgtcaaactcggcttcgctaagataccccagcgcaagggccgcagcttttaaggtcagcccttctttatgcgcttttttggcgatctcggcggctttgtcataaccaatgtgggtgttaagcgcagtcaccagcatcaggctttcattgagtaattgattgattcgctcacgattcggttcaatacccactgcgcagtgtttgttaaaactttccatgccatctgccagcaagcgcacgctttgcaggaaattgtggatcaccattggacggaagacgttcagttcaaagttaccggaagcgccccccatgttgatcgccacgtcgttccccatcacctgacagcagagcatggttaatgcctcacactgtgttgggttcactttccccggcatgatactgctgcccggctcattttccgggatactgatttcaccaattccgcagcgcgggccagaggccagccagcggacatcattggcgattttcatcagactcgcagccaaccctttcaacgcgccgtgcgcctgaaccagggcatcacaggtcgccagcgcttcaaatttgttcggcgcggtaacaaacggtgcacaggtaatgactgccagttcatctgctacgcgacgcgcatactccggatgggtatttagtccagtacccaccgctgtaccgccaagagccagttccgctacgtgaggcaggctgtattcgatatgtttgagattatgctcgagcatcgctacccagccggaaatctcctgccccagcgttaacggcgtggcatcctgcaagtgagtacgaccaattttgacgatatcggcaaaagcacgggatttctcattcagtgtctgtgtcagggttttaagctgaggaatgagttgcttgcgcagcgccagcagcgccgcaacgtgcatcgccgtcggaaagacatcgttggaactttggcttttgttcacgtcgtcgttagggtgaactttacgttccatcccgcgcacaccgccgagtaattcactggcccggttagccagcacttcgttcatgttcatgttactttgcgtgccggagccggtctgccagatagccagcgggaattcgtcgtcatgctgtcctgccagtacttcatccgccgcctgacgaatggcgctcgctttctcttcagacaacaagcctaaatcttcattaacttttgccgctgcacgcttggttagcgccagcgcatgaatcagactggtgggcattttctccgtgctaatgcggaaatgctccaggctgcgttgagtttgtgcgccccacagcttatctgccgggacatcaatcgcccccatgctatctttttcgctgcgtactgtattcatgacctgctcctcacctgattaattttttctttctgttttgctttcgttaagcaacttttagctcacttattatttaccatttgataacaaatgtttggtctttcgtgccatgtaaaaaaaccgccccgaagggcggctctgtttatttcacacagcgggtgcattgtgtgagttgtatctgctggaagaagtcatttcctttatcatccacaaggataaacgccgggaaatcttccacttcaattttccagatggcttccattcccagttccggatattcaacacattccaggctcttaatacttccctgcgccaatacagcggccggaccaccgatactgccaaggtagaagccgccgtgttttttacaggcatccgtcacctgctggctgcggttgcctttcgccagcatgatcatacttccgccctgcgcttgcagttgatcgacataagaatccatccgtccggcggtcgttgggccaagagaaccggaggcataaccttccggcgttttggccggacccgcgtagtaaatcggatgatctttgatgtactgcggcagcccttcaccgttatccatccgctctttcagtttggcgtgagcaatatcacgaccgacgataatcgtgccgttaaggcttaagcgtgtagaaacgggatactggctcaactgtgcgaggatctctttcatcggacggttaaggtcaacgcgcaccgcttcgccttctcccgctttgcgcagctcttccgggatatatttgcctggattatgttccagtttttcgatccagatcccctgacggttgatcttcgctttgatattacggtcagcagagcaggagacgcccataccgaccgggcaggatgcgccgtgacgtggcaggcgaatcacgcggatgtcgtgagcgaagtatttaccaccaaactgcgcacccagaccaagattttgcgcttcgatcagcaattctttttccagttccacatcgcggaacgcctgaccgtgctcattcccttccgttggcagttcatcatagtatttcgcggaagccagtttcaccgttttaaggttcgtttctgcagaagttccaccaataacgaacgcaatatgatacggaggacaggccgccgtacccagcgtgcgcatcttctcaaccaggtaatttttcagtttccccggcgtcagtaacgctttggtttcctgatagagatacgtcttgtttgcgctaccaccacctttggcgatacagaggaatttgtattcgtcgccatcaacggcataaagatcgatctgcgctggcagattggtgccggtattcacttctttatacatatccagcggcgcgttttggctgtagcgcagattatcttcgatataagtgttatagacaccgcgcgccagcgccgcttcatcaccaccaccggtccatacacgctgcccttttttaccaacaataatcgcggtgccggtatcctgacaggttggcagaacgcctttcgccgcgatgtcggagttacgcaggaattgcagcgccacatatttatcattttcgctggcctccgggtcacgcagaatgtcggccacctgttgttggtgcgccggacgcagcatgaagctcgcatcatgaaacgcctggcgcgccaacagagttaacgcttcgggtgcgactttcaaaatctcctgcccttcaaattcagatacgctaacgtgttcgctggttagcaggtaatactcagtatcatcttttttgagtggaaaaggagcctgataatgaaagggtttgttactcattgttctctcacttactgcctggtttggttatgctctgggcgggtgttccgttgccctgttaaaagcgagtaacaatatcctacacacttttttaacaaaaactgagactagtacgactttttgcggctccaggttacttcccgtaggattcttgctttaatagtgggattaatttccacattaaaacagggattgatcatgcaaaaactcattaacagtgtgcaaaactatgcctggggcagcaaaacggcgttgactgaactttatggtatggaaaatccgtccagccagccgatggccgagctgtggatgggcgcacatccgaaaagcagtagtcgagtgcagaatgccgccggagatatcgttagtctgcgtgatgtgattgagagtgataaaagcactctgctcggagaggccgttgccaaacgctttggcgaactgcctttcctgttcaaagtattatgcgcagcacagccactctccattcaggttcatccaaacaaacacaattctgaaatcggttttgccaaagaaaatgccgcaggtatcccgatggatgccgccgagcgtaactataaagatcctaaccacaagccggagctggtttttgcgctgacgcctttccttgcgatgaacgcgtttcgtgaattttccgagattgtctccctactccagccggtcgcaggtgcacatccggcgattgctcactttttacaacagcctgatgccgaacgtttaagcgaactgttcgccagcctgttgaatatgcagggtgaagaaaaatcccgcgcgctggcgattttaaaaagcgccctcgatagccagcagggtgaaccgtggcaaacgattcgtttaatttctgaattttacccggaagacagcggtctgttctccccgctattgctgaatgtggtgaaattgaaccctggcgaagcgatgttcctgttcgctgaaacaccgcacgcttacctgcaaggcgtggcgctggaagtgatggcaaactccgataacgtgctgcgtgcgggtctgacgcctaaatacattgatattccggaactggttgccaatgtgaaattcgaagccaaaccggctaaccagttgttgacccagccggtgaaacaaggtgcagaactggacttcccgattccagtggatgattttgccttcagcctgcatgaccttagtgataaagaaaccaccattagccagcagagtgccgccattttgttctgcgtcgaaggcgatgcaacgttgtggaaaggttctcagcagttacagcttaaaccgggtgaaagtgcgtttattgccgccaacgaaagtccggtgactgtcaaaggccacggccgtttagcgcgtgtttacaacaagctgtaagagcttactgaaaaaattaacatctcttgctaagcttattaaaggcttataacaccttcaggcggccagtccgcctgatttcattttatggataatcattatgaataaaagcctggtagcggtaggcgtcattgttgcgctaggcgtagtctggacaggcggcgcatggtatacaggcaagaagattgaaacccatctcgaagacatggtcgcgcaggcgaacgcgcaactcaaactgacagctcctgaatccaacctggaagtgagttatcaaaactatcatcgcggcgtattcagcagccagttgcaactgttggtgaaacccattgccgggaaagaaaatccgtggattaaaagcggtcagagcgtcatcttcaacgaaagcgttgatcatggtcccttcccgcttgcccagcttaaaaaactgaacctgatcccgagcatggcaagtattcaaaccacgctggttaataacgaagtaagcaaaccactgtttgatatggcaaaaggtgaaacgccttttgagattaacagccgcattggttacagcggtgattccagttccgatattagcctcaagccactgaattacgagcaaaaggatgaaaaagtcgcctttagcggcggcgagttccagttaaatgctgacagagacggcaaagccatctccctttccggggaggcgcaaagtggtcggatagacgcagttaacgaatacaaccagaaagtgcagttgacctttaataatctgaaaaccgacggttccagcacgctggcaagttttggtgagcgtgtaggaaatcaaaaactgagtctggaaaaaatgaccattagtgtggaaggcaaagaactggcactgctggaaggcatggagatcagcggtaaaagcgatctggtcaatgacggtaaaacgatcaatagccaactggattacagcctaaacagcctgaaggtacagaatcaggatctgggcagcggcaagctgactttaaaagtcggccagattgatggtgaagcctggcatcagtttagccagcaatataacgcgcaaactcaggcgctgctggcacagccagaaattgccaacaaccccgaactttatcaggagaaagtgacggaagccttctttagcgccctgccgctgatgctgaaaggcgatccggtgattactatcgcgccgctaagctggaaaaacagtcagggtgaaagtgccctgaatctgagcctgttcctgaaagatccggcaacgactaaagaagcgccgcaaacgctggcgcaggaagtagatcgtagcgttaaatctctggatgcgaaactgaccattccggtggatatggcaactgagtttatgactcaggtagcgaagctggaaggttatcaggaagatcaagcgaaaaaactggcgaaacagcaagttgaaggtgcaagtgcaatggggcagatgttccgtctgaccaccttgcaggacaataccatcaccaccagcctgcaatatgctaacggtcagataacgttaaatgggcagaaaatgagcttagaagattttgttggcatgtttgcgatgccagctcttaacgttccggctgtaccggcaattccgcagcagtaattcacggccaaaacgccggagaattttcactccggcgttttcatctgaaaacaaaccagagattgcctgatgcgctacgcttatcaggcctaccttttcctgcaacactttgaatttatgagtttttgtaggctggataaggcgtttacgccgcatccggcataaaaaacgcgcactttgtcaacaatctgaaacgccggagatttttctctccggcgttattttttacttcagcataaagtcatactgaatactcattttcacatcccagtaattcaggcgatcgcccagcgtactgccatcgcgcttttcccgccctttatcggcagcaagaaagaaattcatcccttgtaacggcccttcgctgacccgatagttcataccacctaagatacccgtgccttcaatccgcacatctcgtttactggattcatagccgcgagtcacaatcggtgcaaatgtcagcgtaaattgcggcgttaaacgatagttgacgcccaattgccaggactgcattccttcacggttacgatcaagacttaaactaaagggatagccaatgtcggtatccaccacggcaccattcattgcatggcgcaaataaccaccactgccaaatacacttccccacggcgcattccaggtcaattgtccactaaccaacgccgtttcattgggctggctggtattacgacttaaaccttcgagctgcgcgtaaaagccgagcaactcccctttcaacgtataattcgggtcgagcggtatgcttttctcgagaatactttgtatctgattggaaacatctttctgtacgcttgcccccagagaatagcgactggtatcatcatgccaactggcggctaaaaaagaacgtgcgcgatgtttatcgtattttcccgtctggctgttatacaccccttcatcacgaataccggttgtactatcagtccataaaaatactcgactacgccacattccccacagatcaatatttggtgttaaagcccaataacctaatgctccttcagaaactgtcggtaatgtacgttggctactgccagccattaacggaatacgataaggtaagctaccataactataatccgtcccgaagcgacctaatttaagcaggctattttcactgggttttatttttactgcccccagggcaaagccaaaacttttatcaccatcaagataccaccgggtactcatatcagcacgagcacctaatttataaacataatacgccccgccttcaacgccaataatattggaataataaccactattgaaatcgagcaatcctccctgtacccatgcgtaaatatctcttcccgcgccagcactgggcttatccgccctgcgcaattcgtttttcagtctgatgcgtagtcccgcttcatcgtcagccagttgcgccgcataagcagaggtaaggccagaggcagccgtcaggcaaataacggccatggccactatttttctcatagttgcacctttgatgttctgattatttttattgaatattaattagtgatatcgctgattaattgctgctgcacttttttacgattatcaatttcaaccacgatttctttgaattttttatccgtgagcggataaaaccagataataacgaatgccagtagcataaatccgcaaggtactaaggcaatacttgtgcggatgcccataataacttccggcgtttgcacctgattggcgatatatccgcttaaccccaaaataaaggcaggaatactacctccgattgcctgaccgcatttacgggtaaaactgaatagactataggtgagcccttcaattcgcacgccggtcaggtattcaccgtattctacggtatcagcttccagcgcccacatcacggtcatggtaacgccctgaccaatactagcgatggccaacgcaaccaacgccaccggcagactccagacggaaacccagaagaacagcagataaccgcaggttcccagcaaagcgccaatcaggaaggtattctttttaccgatcctcgcgaccatccccggcaccagcggtgcgcttgccacagtaccaaccaggttttgcaccagtaccagcacagtgaacagcccggtatcatttaacacatagcgcacgtagaacaagctgctggcgctgaccgcaaaggtgctaatcagcacacacagcgcaccgatgcacaacataaacagcgggcgattccgtttcagggtttgcagactgatattcaaactcggctgcgcaacgatacgtaccacattctcacgcgtgcttttgaagcagatgaagtaaagcaccattccggcaatcgccagcacaattgtccagaaatggtatacgctcaccatctcttccgggctggagttcttaatgctcggtcctatcagaaatgccaggcagacaaaggtcaaactagcggcaatcccacgagccgcgcccagacgggcgcgggattgtggttgttgggtcatcgcggtagcaagactaccataaggaatattcaccaggctgtagcaaagcccgaggcccatgtaggtcaaatatgcatacaccactttgctaccatggctccagtcggtcagcacccagaataccagcacgctgaagatcattaacggcgcagtaccgaagagtaaaaacgggcggaattttccccagcgggtattcacactgtccaccactcgtccggcaaagacgtcggcgaaggcatcgaatacccgcaccagtaacagcatggtgcccgccgcagcggcaccgacgccagcgacgtcggtgtagtaactcaacaggaagagcgcccccattgcgaaggcgaagttattggcgacgtcaccgaggctgtagccgacgatggtgcgccaggagagttgttgattcattgtttgcctccctgctgcggtttttcaccgaagttcatgccagtccagcgtttttgcagcagaaaagccgcgctcttcggtttgcggtcgcgagtgaagatccctttcttgttaccgccaacgcgcaatatgccttggctggtcgcaaaatcggcgaaattccatacctgttcaccgacgacggcgctgacgcgatcaaagacgcggtgatacatatccagccatgcacactgatactcttcactccacatgtcggtgtacatactgtgcagcccggctaacgtatccacgccgtattcggtgatgataatcggctgatgcagtttctcctgccaggccagaagttctttttccagtaccttctctgccgtttccaaatcgccgctttggacataccatccgtaataacggttcaggcacagcacatcaaagagatcgctgatggtatcggtgtgagcgtcgcagaacattacattgacgcaggtgatcggacgcgtcgggtcgagtttacgcgttgcttccgccagtggcgcgaaatattcccgtgcaccttgcggacgggtatccggttcgttggcaatactccacatcaccacgcttgggtggtttttgtcacgcgctatcagctctttaatcgcctgtaagtgcgcttgctgagtttccccgttgactgcctcttcgctgtacagttctttcggcttgttgcccgcttcgaaaccaatgcctaaagagaggttaaagccgacagcagcagtttcatcaatcaccacgatgccatgttcatctgcccagtcgagcatctcttcagcgtaagggtaatggctggtacggtaggagttggccccaatccagtccattaatgcgtggtcgtgcaccatcagcacgttatcgaatcctttgccacgcaagtccgcatcttcatgacgaccaaagccagtaaagtagaacggtttgtggttaatcaggaactgttcgcccttcactgccacactccggatgccgacgcgaagcgggtagatatcacactctgtctggcttttggctgtgacgcacagttcatagagataaccttcacccggttgccagaggtgcggattcaccacttgcaaagtcccgctagtgccttgtccagttgcaaccacctgttgatccgcatcacgcagttcaacgctgacatcaccattggccaccacctgccagtcaacagacgcgtggttacagtcttgcgcgacatgcgtcaccacggtgatatcgtccacccaggtgttcggcgtggtgtagagcattacgctgcgatggatcccggcatagttaaagaaatcatggaagtaagactgctttttcttgccgttttcgtcggtaatcaccattcccggcgggatagtctgccagttcagttcgttgttcacacaaacggtgatacgtacacttttcccggcaataacatacggcgtgacatcggcttcaaatggcgtatagccgccctgatgctccatcacttcctgattattgacccacactttgccgtaatgagtgaccgcatcgaaacgcagcacgatacgctggcctgcccaacctttcggtataaagacttcgcgctgataccagacgttgcccgcataattacgaatatctgcatcggcgaactgatcgttaaaactgcctggcacagcaattgcccggctttcttgtaacgcgctttcccaccaacgctgatcaattccacagttttcgcgatccagactgaatgcccacaggccgtcgagttttttgatttcacgggttggggtttctacaggacgtaacataagggactcctcattaagataataatactggtcaacctttaatctgattagttaaccaattctgtgttgcacacagttatctgtgagaaacccatggaagagaaatggaaataaaaagaactgacaccgcgatcaaaaaaccaaaaactgcaatacccacagcgtgatatagatcgcattaatctttaaaacagcgttgacagaagccataaaataagcaaccgaacgttcgttcgagcgtattgggaacgataaactctcatgacatatggctacagtgaatattttggggggaattctccgaagccgggaaggataatttttgcacagagaaattacgatatgaaacgcgggcacagttatcaccagcccgccgaaaaagagagagaatcaggatgcggttaagataccgccaatcatcgcgcgtaatccctgagcaaagctcgcttcacgcgccaggtcttccgcttcgatatcggccagtacaccgtaggtcagatccagcagtaaacgactagtcattgccgtgttgatgtctgggcttatctcgcctttttgctgggcatcacgcatccgctgggcaacaaattccgtgatcgtcatatgcttatttttaagcatggcggcgacctgtgggttacgcatcccttccgccataatttcaaccaccagcgcccgttgtccaaaggcttcatgggtgagagagacaatggactcgaccatatagtcaacgaaatgaatcccttcaatcggttcccggaaacgggccagcgccctctcctggtcctgtaagataatcgcctgaatcaaggcttctttggagatgaaatggtgatagagcgtcccgggactaatggcgcaagatttacagatggctttcatgctggcactgtgaaatccattttcactaaaaatctctctggcagcattgaggatccgggtccgtgtcggttgtgcttcagtctgcatgttatccatcattaaaccattatagttagcgtgaataactagtttaccgcgttgtcaggtgagcgcctatcattgctgttgaatagtgcgaaggcacactctattcgtatacttttcactctgaaattggttaaccaatagccgtgatttggctgccagttatttagcagagacgttgatgagtttatcccggtaaacaacacgcacggttgtttaccggtccgttagtgtattaattgagctcctgtaccccaccaccggagacggtgagaatttgtccgcttacccagctcgcagcagggctgcaaaggaacagcgctgcgttagcaatatcttgcggttggcccagacgtctgatcggcgtgtgctgtaacattttttgttcaatttctggtgtaataacggatttcagggcatcggttaatattgcccccggcgcaatgccatttacccgaatatttttttcacccaggtcaaacgccatatttctgaccagatgactggccgcagctttagaacttgcataggaagtcatgtttatatttttattttctgccgccatagaagtgatggtcagaataacgccaccgccatttttttccatttctggcgcaacaagttgactcagatggaaaaaagaaaacacattcagttcataagcacggcgaaaatccgccattggcatatcaaacggtttaggtccaccgccaccggcgttgttaaccagaatatcaactttacccagcttactgatagcaaagtctgccagtgcagagagttcctgttcggaagtaatatcacaacggcaggcaaatgcctgaccacccagttgttgaatttcgtctacaacatggttagctgcgtcggcgttaatatcactgaccaccacagatgcgccagctgtcgcgaatgtaatggcgatttctttaccaatacctgcacccgcacctgtgatgatggcgcattttccgtcgagtctcaggttgtcagaattaaacacataaacctcctgtgaacttcagtaaaaataaaaggcaccgcctgtgtgccacattttttatcattaaccttgaggaaaggacactaccaggtatagcagataaagagaggattatttcgctgcaatgagccgggcgggaataataagattgcgactatgcgtctcttcatgggtgattttttgcatcatgcgatccgcaagtgtgataccaagttcccgcgctggcgtgctggcccaggtaacaggtatatcatcaagtgtggttggtgtcgcatcggtaaatgccgccaggctaacctgttgctcaaagtaacgatcgactccgctttccccgctttgccgccctgctttgagcaaaccaaaccatgcccccatcgcaatagtttcgttatagcaaaccacggcactgatggtcgggttatgacgtaaaagcgccgtgatagcttccgcggcttgcttctggctggaagtgcactccaacacccaatcgctatgaaacggcaggccaaattttagtagagttgcacaatagcccccaacccgttctgcacgggttaaactggaactttgccctcccagccaggcgatccgctgatgcccattgcgaatgagatgctccgtcaacaactgtgcagcctgcatgttgtccgggcgaaccgtatcaacatcatcaagataactggcacgggaagcgaaaatcaccgggatagctttttcttctgccatccgtcgcaggtcatcgctacttcctgcagctccggcaattaccacaccatcgacaccctgattcagtaacagactaaaccgctgtgccagctgctcaccgtctttaccgccgtgaagcaaaaaaaccatccgtccctgcgcttccagagcttccgtcaatccggccgtcaattcggcgtaaaacggcgcagataaatcacggacgatcaaaccaatgacgccgctttgcccgccgcgcagcgcgctcgcctggcgattgcgcacaaatcccagctcttcaatggcggcgttaacgcgttctcctgtggcggtagagattcgccctttgccactaagcaccaggctaacggtacttacgctcacgcccgcagccagcgcaacatcatgaatggttatttttttggcggtagccatgcagatgacctactccctgattatgtgacagataaaacgttttaccttttatttatcttatacccgctattatcgttgcgtaatgtgatttatgcctcactaaaatttgataaaacgttttatcttctcgcgcaatttactgaatccagattgttctctacgaggagtcgttttatgacggcgaaaacagcaccgaaagtcacgctgtgggagttcttccagcagttaggcaaaaccttcatgttacccgtggcattattgagcttctgcggcattatgctcggcattggtagttctcttagcagccatgatgtcataaccctgatcccggtcctgggcaaccccgtgttgcaggctatctttacctggatgagtaagattggcagctttgcttttagtttcctgcctgtcatgttctgtatcgccatcccgctgggcctggcacgcgaaaataaaggcgtagcggcattcgctggcttcatcggttatgcggtaatgaacctcgcggtaaacttctggttgaccaataaaggcattctgccaaccacggatgccgcggttctgaaagccaataacatccagagcattcttgggatccagagcatcgataccgggatcctcggtgcggtgatcgccggtattatcgtctggatgctgcatgagcgtttccataatatccgcctgccggatgcgctggcattcttcggcggtacgcgcttcgtaccaattatctccagcctggtgatgggccttgtcggcctggtgattccattagtctggccgattttcgccatgggtattagcggcttgggccatatgataaacagcgcgggtgatttcggaccgatgctgtttggtaccggtgaacgtctgctgttgccgtttggtctgcatcacattctggtggcattaattcgctttaccgacgcaggcggcacgcaggaagtctgcggtcaaaccgtcagcggcgcactgaccatcttccaggcgcaattgagttgcccgaccactcacggtttttctgaaagcgccacgcgtttccttagccaaggtaaaatgcctgcgtttctcggcggtctgccaggtgcagcgttagctatgtatcactgcgcgcgcccggaaaatcgccataaaattaaaggtctgctgatttctggcctgatcgcctgcgtcgttggcggcactaccgaaccgctggaattcctgttcctgttcgtagcgccagttctgtatgtcatccacgcgctgttaaccggcctcggcttcaccgtcatgtctgtgctcggcgtcaccatcggtaataccgacggcaatatcatcgacttcgtggtgttcggtattttgcatggtctgagtaccaagtggtacatggtgccagtggtggcggcaatctggtttgtcgtttactacgtcatcttccgtttcgctatcacccgcttcaatctgaaaaccccggggcgcgatagcgaagttgccagcagtatcgaaaaagccgttgccggtgcgccgggtaaaagtggttacaacgttcctgcaatcctcgaagcattaggcggtgccgacaatattgtcagcctcgataactgcattacccgtctgcgtttgtctgtgaaagatatgagccttgttaatgtgcaggcactgaaggacaatcgggcaattggcgtagtacaacttaatcaacataacctgcaggttgttatcgggccacaagttcagagtgtaaaagatgaaatggccggtctgatgcatactgtccaggcataaggataagatatgttcgattttagtaaggtcgtggatcgtcatggcacatggtgtacacagtgggattatgtcgctgaccgtttcggcactgctgacctgttaccgttcacgattagtgacatggattttgccactgccccctgcattatcgaggcgctgaatcagcgcctgatgcacggcgtatttggctacagccgctggaaaaacgatgagtttctcgcggctattgcccactggttttccacccagcattacaccgccatcgattctcagacggtggtgtatggcccttctgtcatctatatggttagtaaactgattcgtcagtggtctgaaacaggtgaaggcgtggtgatccacacacccgcctatgacgcattttacaaggccattgaaggtaaccagcgcacagtaatgcccgttgctttagagaagcaggctgatggttggttttgcgatatgggcaagttggaagccgtgttggcgaaaccagaatgtaaaattatgctcctgtgtagcccacagaatcctaccgggaaagtgtggacgtgcgatgagctggagatcatggctgacctgtgcgagcgtcatggtgtgcgggttatttccgatgaaatccatatggatatggtttggggcgagcagccgcatattccctggagtaatgtggctcgcggagactgggcgttgctaacgagcggcagcaaaagtttcaatattcccgccctgaccggtgcttacgggattatagaaaatagcagtagccgcgatgcctatttaagcgcactgaaaggccgtgatgggctttcttcccctagcgtactggcgttaactgcccatatcgccgcctatcagcaaggcgcgccgtggctggatgccttacgcatctatctgaaagataacctgacgtatatcgcagataaaatgaacgccgcgtttcctgaactcaactggcagatcccacaatccacttatctggcatggcttgatttacgtccgttgaatattgacgacaacgcgttgcaaaaagcacttatcgaacaagaaaaagtcgcgatcatgccggggtatacctacggtgaagaaggtcgtggttttgtccgtctcaatgccggctgcccacgtagcaaactggaaaaaggtgtggctggattaattaacgccatccgcgctgttcgttaaccccaattgcgcaacgtaaaaaatcgttgcgcaatcgtggatttttaccctgctttgtttttataatggtgcgcacttttatatccagaaaaagagtgcgaccatgattgataccaccctgccattaactgatatccatcgccaccttgatggcaacattcgtccccagaccattcttgaacttggccgccagtataatatcagccttcctgcacaatccctggaaacactgattccccacgttcaggtcattgccaacgaacccgatctggtgagctttctgaccaaacttgactggggcgttaaagttctcgcctctcttgatgcctgtcgccgcgtggcatttgaaaacattgaagatgcagcccgtcacggcctgcactatgtcgagctgcgttttagtccaggctacatggcaatggcacatcagctgcctgtagcgggtgttgtcgaagcggtgatcgatggcgtacgtgaaggttgccgcacctttggtgtgcaggcgaagcttatcggcattatgagccggaccttcggcgaagccgcctgtcagcaagagctggaggcctttttagcccaccgtgaccagattaccgcacttgatttagccggtgatgaacttggtttcccgggaagtctgttcctttctcacttcaaccgcgcgcgtgatgcgggctggcatattaccgtccatgcaggcgaagctgccgggccggaaagcatctggcaggcgattcgtgaactgggtgcggagcgtattggacatggcgtaaaagccattgaagatcgggcgctgatggattttctcgccgagcaacaaattggtattgaatcctgtctgacctccaatattcagaccagcaccgtagcagagctggctgcacatccgctgaaaacgttccttgagcatggcattcgtgccagcattaacactgacgatcccggcgtacagggagtggatatcattcacgaatataccgttgccgcgccagctgctgggttatcccgcgagcaaatccgccaggcacagattaatggtctggaaatggctttcctcagcgctgaggaaaaacgcgcactgcgagaaaaagtcgccgcgaagtaacaaaatggatggtgcaaatgcaccatccatttttcatgcaaggcacaaagtcgcgcgatgtttggcggattcgatgcccagctcaatcaactccattacctggattgcctggcttgccggaaccggattttcaccatcgccatttaacgcatcacgaatagccgcatagtaagccggataattcccaggcaccgtcaacagcgtttcttcgacacgttcctcaccttccacgcgggtaagtacgccatcacgcatatcgtagccccagtcttcctgcggtagacgctcgccatttttcagacgttcttcctgtggatcgaggccatatttcacataactgcctcgggatccatgcacgatataccgtgcactctcagcggctgccagcatggtaccgtgtaaaatgactcgccgctgtggataggacaagatggcgtggaaataatcggtgctctgcgctccgggccgtaactgtgccaaatctaccgtcatgctgaccggtaaaccaaaaagcgtaatggcctgatcaagaagatgtggtgctaaatcgtaccagataccgctgcctgggccgccctgttcacgccaacgatcgcgcacctgcggacggaagcggtcaaaatgagactcaaagtaagcaacttcacccagcacgccttccgcgagtaaaccttttagcgtcaagaaatcgctatcccagcgacggttatggaatacagacagcacacgccccaggctttttgccagcgcatccagctctcgcgcttgactcagtgtcacggtaaagggtttatcaacgaccacatgtttacccgcctcaagcgccgctttggctaacgggaaatgggtatcgttgggtgtaggaatgacaatcaggtctatgttgggatcgttaaacagatgcttcggctcagagacaaccgtaaccgttggccagtcggcttttacttttgtttcatcactgctggagattaccgccagttcctgcccgggcgtgcccgcaatcaggggcgcatggaaggttttgctcgcataaccatacccaatcaacccaacacggatgttgtcgctcatgtcattgcctctcattgaagtatgatggctatttgacactatcctttacccacgctcaacagtttaataacctgccagcaataagggatgttgtttaacttaagtcaaaaaaatagcgaattttccaacgacaaaagctaaatatcgcaaaaacctcagtaaaaatcttgctggagctattattgctaagtaacatttaccccctgaagttaatggatcaatcaagagagatgtgggctgtaatgaatcgtcttattgaattaacaggttggatcgttcttgtcgttagtgtcattcttcttggcgtggcgagtcacattgacaactatcagccacctgaacagagtgctagcgtacaacacaagtaagctctgcacttgtggagcgacatgctgcccgtccgggtgcatgttttcacttgtcggatattaaaccaggaatttattatcttgttcgatgttgttggtgattgtcagggatagtaaagcgcgttactcttttcagagcagtttttcatccctgaatatttgccatcagcgcattcttattattgtaataacacaagcgttcacttttggtgaaattttatcatcactaataatacctacccctttggtattaattattttatggaccttttatgactgttcaggactacttattaaaatttcgcaaaatcagtagtctcgaaagtctggaaaaactctacgaccatcttaattacaccctgacggacgatcaggaactgatcaatatgtatcgtgctgccgatcaccgtcgcgcagagctggtttctggcgggcgtttgtttgacctcggccaggtaccgaagtccgtctggcactatgtccaataaagaaagtagcgatcggttataaaagccttataataacgcccctaaaattagatttgcctgtttgcgtcgctattctggagaacctatgaccaccacaacgccacaacgtattggaggctggttgcttggcccgttggcctggcttttagtcgctctgttgagtacgacgctggcgttgttgctgtataccgctgcgttatcttctccgcaaacatttcaaacgctcggcggacaagcactgacgacacaaatcttatggggcgtttcttttattaccgctatcgccttgtggtattacacactgtggttgaccatcgctttctttaaacgtcggcgttgtgttcctaaacactatattatctggctgcttatttccgtattgctggcagtaaaagcattcgcttttagtcccgtggaagatggcatagccgttcgccagttgctgtttactttgttggcaaccgcattgatcgtcccctatttcaaacgcagcagccgggtaaaagcgacgtttgtgaatccgtaataaccttacagttaacctgttgtcgcctgctctggattaacggataataggcggcttttttatttcaggccgaaaaatgactgactacctgttactgtttgtcggaactgtactggtcaataactttgtactggtcaagtttctcggtctctgtccgtttatgggggtttccaaaaaactggaaaccgcgatgggcatggggctggcaacaacgtttgtgatgacgctggcgtctatttgcgcctggcttatcgatacgtggattttgatcccacttaatctgatttacctgcgcaccctggcatttattctggtgattgctgtggtcgtgcagttcaccgagatggtggtgcgcaaaaccagcccggtgctttaccgtctgctggggatttttttgccgcttatcaccaccaactgtgcagtgctcggcgtggcgttgctgaatatcaatctcgggcacaatttcttgcagagcgcgctgtacggtttttccgccgctgtcggtttcagcctggtgatggtgctcttcgccgccatccgcgaacgccttgctgtggctgatgtcccggcaccttttcgcggtaatgccattgcgttaattaccgcaggtcttatgtctctggcctttatgggctttagtggtttggtgaagttgtaatgaatgctatctggattgccgttgccgccgtgagcctgctgggcctggcgtttggcgccattctgggttatgcctcccgccgttttgcggtggaagacgatccggtcgttgagaaaattgacgaaatcttaccgcagagccagtgtggtcagtgcggttatcccggctgtcgcccctacgcggaagccatcagctgtaacggtgaaaaaatcaaccgttgcgccccaggtggcgaagctgtgatgctaaaaattgccgagttgcttaatgtcgagccgcagccgctggatggcgaagcgcaagagataacgcctgcgcggatggtggcggttattgatgaaaataactgtattggctgcactaaatgtattcaggcgtgtccggtagacgccatcgttggcgctacccgtgccatgcatacggtaatgagtgatctctgtacgggctgcaatttatgtgttgatccgtgcccgacgcactgcatcagcttgcaaccggtcgcagaaacacctgactcctggaaatgggatctgaacaccattcccgtgcgtatcattcccgtggaacaccatgcttaagttattctctgcattcagaaaaaataaaatctgggatttcaacggcggcatccatccaccggagatgaaaacccagtccaacggtacacccctgcgccaggtacccctggcgcagcgttttgttattccactgaaacagcatattggcgctgaaggtgagttgtgcgttagcgtcggcgataaagtattgcgcggccagccgcttacccgtggtcgcggcaaaatgctgcctgttcacgcgcccaccagcggtaccgttacggctattgcgccccactctacggctcatcctagtgctttagctgaattaagcgtgattattgatgccgatggtgaagactgctggatcccgcgcgacggctgggccgattatcgcactcgcagtcgcgaagagttaatcgagcgcatacatcagtttggtgttgccgggctgggcggtgcaggattcccgacaggcgttaaattgcagggtggcggagataagattgaaacgttgattatcaacgcggctgagtgcgagccgtacattaccgccgatgaccgtttgatgcaggattgcgcggctcaggtcgtagagggtattcgcattcttgcgcatattctgcagccacgcgaaattcttatcggcattgaagataacaaaccgcaggcgatttccatgctgcgcgcggtgctggcggactctaacgatatttctctgcgggtgattccaaccaaatatccttctggcggtgctaaacaattaacctacattctgaccgggaagcaggttccacatggcgggcgtagttccgatatcggcgtattaatgcaaaacgtcggcactgcttatgcagtgaaacgtgccgttattgatggcgagccgattaccgagcgtgttgtaaccctgactggcgaagcaatcgctcgcccgggcaacgtctgggcacggctggggacgccagtgcgtcatttattgaatgatgccggattctgcccctctgccgatcaaatggtgattatgggtggcccgctaatgggctttaccttgccatggctggatgtcccggtcgtaaagattaccaactgtctgttggctccctctgccaatgaacttggcgaaccacaggaagaacaaagctgcatccggtgtagcgcctgtgctgacgcctgccctgcggatcttttgccgcaacagttgtactggttcagcaaaggtcagcaacacgataaagctaccacgcataacattgctgattgcattgaatgtggggcttgcgcgtgggtttgcccgagcaatattcccctggtgcaatatttccgtcaggaaaaagctgaaattgcggctattcgtcaggaagaaaagcgcgccgcagaagccaaagcgcgtttcgaagcgcgccaggctcgtctggagcgcgaaaaagcggctcgccttgaacgacataagagcgcagccgttcaacctgcagccaaagataaagatgcgattgctgccgctctggcgcgggtgaaagagaaacaggcccaggctacacagcctattgtgattaaagcgggcgaacgcccggataacagtgcaattattgcagcacgggaagcccgtaaagcgcaagccagagcgaaacaggcagaactgcagcaaactaacgacgcagcaaccgttgctgatccacgtaaaactgccgttgaagcagctatcgcccgcgccaaagcgcgcaagctggaacagcaacaggctaatgcggaaccagaacaacaggtcgatccgcgcaaagccgccgtcgaagccgctattgcccgtgccaaagcgcgcaagctggaacagcaacaggctaatgcggaaccagaagaacaggtcgatccgcgcaaagccgccgtcgaagccgctattgcccgtgccaaagcacgcaagctggaacagcaacaggctaatgccgagccagaacaacaggtcgatccgcgcaaagccgccgtcgaagccgctattgcccgagccaaagcgcgcaaacgggaacagcaaccggctaatgcggagccagaagaacaggttgatccgcgcaaagctgccgtcgaagcggctattgcacgcgccaaagcacgcaagctggaacagcaacaggctaatgcggtaccagaagaacaggttgatccgcgcaaagcggcagttgccgcggctattgcccgcgctcaggccaaaaaagccgcccagcagaaggttgtaaacgaggactaaatggtattcagaatagctagctccccttatacccataaccagcgccagacaagccgcattatgctgttggtgttgctcgcagccgtgccaggaatcgcagcgcaactgtggttttttggttggggtactctcgttcagatcctgttggcaagcgttagtgctctgttagccgaagctctcgtactcaaactacgcaagcagagcgtagccgcagcgttgaaagataacagtgcattgctgacaggcttattgctggcggtaagtattccccccctcgcgccatggtggatggtcgtgctgggtacggtgtttgcggtgatcatcgctaaacagttgtatggcggtctgggacaaaacccgtttaatccggcaatgattggttatgtggtcttactgatctccttccccgtgcagatgaccagctggttaccgccacatgaaattgcggtcaacatccctggttttatcgacgccatccaggttatttttagcggtcataccgccagtggtggtgatatgaacacactacgcttaggtattgatggcattagtcaggcgacaccgctggatacatttaaaacctctgtccgtgccggtcatagcgttgaacagattatgcaatatccgatctacagcggtattctggcgggcgctggttggcaatgggtaaatctcgcctggctggctggcggcgtatggttgctatggcagaaagcgattcgctggcatattcccctcagcttcttagtaacgctggcgttatgcgcaatgttgggctggttgttcagtccagaaacactggcagcaccgcaaattcatctgctgtctggagcgaccatgctcggcgcattctttattttgactgacccggttaccgcttctacgaccaatcgtggtcgtcttattttcggcgcgcttgcgggcttattagtctggttgatccgcagtttcggcggctatcctgacggcgtggcttttgccgtcctgctggcgaacatcacggttcctctgatcgattactacacgcgtccgcgcgtctacggccatcgcaaagggtaaaccatgctgaaaactatccgaaaacacggcattacgttggcgctatttgcagcgggtagtacagggttaactgcggccatcaaccagatgaccaaaacgacgattgctgaacaggccagtctgcaacaaaaggcgttatttgatcaggtgctgccagccgaacgctataacaatgcgctggcacagagttgctatctggtaactgcgccagagttaggtaaaggtgagcatcgggtttacatcgccaaacaggatgacaaaccggtagccgccgttctggaagcaaccgcgccagatggctattccggtgcgattcagctgctggtgggagccgattttaacggcacggtacttggcacgcgcgtgacagagcaccacgaaacgccagggcttggcgataaaatcgaactgcgcctttctgactggatcacccattttgcgggtaaaaaaatcagtggtgcagatgatgcgcactgggcggtgaagaaagatggtggtgatttcgaccagttcaccggcgcgacgattactccccgcgcggtggttaatgcggtaaaacgcgccggattgtacgctcagacgttaccggcacaactttctcaacttcctgcctgtggagaataaagcgtgagcgaaattaaagacgttattgttcaggggttgtggaaaaacaactctgcgctggtccagttgctcggcctttgtcctctgttggcggtcacgtccactgccactaacgctctgggtttaggacttgcgactacgctggtactgacgctgaccaacctgaccattagcacgctgcgtcactggacgccagccgagatccgcattcccatttacgtgatgatcatcgccagcgtggtcagcgctgtacagatgctgatcaacgcctacgcctttggcctgtatcaaagtttagggatttttattccgctgattgtcactaactgtatcgttgtgggccgcgctgaagccttcgccgccaaaaaaggtccggcgcttagcgcactggacggctttagtattggtatgggcgcaacctgcgccatgttcgtgctgggtagtctacgcgaaattatcggcaatggcacattgtttgacggtgcagatgcgctgttaggtagctgggcaaaagtattacgcgtggagattttccacaccgactcccctttcctgctggcgatgctgccaccaggtgcatttattggcctgggactgatgctggcaggaaaatacctgattgatgaaagaatgaaaaagcgccgtgctgaagcagctgcagaacgtgcattgccaaacggtgaaacagggaatgtctgatgaataaagcaaaacgcctggagatcctcactcgcctgcgtgagaacaatcctcatcccaccaccgagcttaatttcagtagcccttttgaattgctgattgccgtactgctttccgctcaggcgaccgatgtcagtgttaataaggcgacggcgaaactctacccggtggcgaatacgcctgcagcgatgcttgaactgggcgttgaaggggtgaaaacctatatcaaaacgattgggctttataacagcaaagcagaaaatatcatcaaaacctgccgtatcttgctggagcagcataatggcgaggttccggaagatcgtgctgcgcttgaagccctgcccggcgtaggtcgtaaaacagccaacgtcgtattaaacactgcattcggctggccgactattgctgtcgacacgcacattttccgcgtttgtaatcgtactcaatttgcgccggggaaaaacgtcgaacaggtagaagaaaagctactgaaagtggttccagcagagtttaaagtcgactgccaccattggttgatcctgcacgggcgttatacctgcattgcccgcaagccccgctgtggctcttgtattattgaagatctttgtgaatacaaagagaaagttgacatctgaagaaaaggggtaacaccgattaccccattgataacctttctttatcctcttttaaaacatctttttaacgtcaatgatgccattgcttagcgttatcatcaggtaatccgtttgcggataaccaaaaatgcaggttaattgtttttttaatagcgaaattttctattcattcgtgatcaagatcacgatgctgtcgcaatgtaaaaacattgcaagaatcaggttaaaatcatttaaatttacacacgcaacaaatattgacctacaaaacattacactggctatttttcagaaactggactatctcactagtaaaaacgctaaatagcagaacatatcgccgttaagccatcacccccctctcagtgcagtgaaaaaatctgccgttacgttttttgaaaaatttaacgctggataacatttcccggaatggttgaattccccgcctcagttatatgtaacagattattacaaaggacttgtctgaaagtgcaagatagtgaacattacctgccgtttcccctcccactataacaattgcgcgtatgttttttatacataacgcgagaaagcacccccgttaatatgggatgtaaaaaaagaggtaaaagtgtccactgcaaaccaaaaaccaactgaaagcgtcagtttgaacgctttcaaacaaccgaaggcgttctatctcatcttcagcattgagttatgggaacgttttggttattacggcctacaaggaattatggctgtttacctggttaaacaactgggtatgtctgaagcggatagtatcacccttttctcttcctttagtgccctggtttatggtctggtcgctatcggcggctggttaggtgacaaggtactgggtactaaacgcgtaattatgctcggcgctattgtgctggcgattggttatgctctggttgcctggtctggtcacgacgccggtatcgtttatatgggtatggcggctattgcggtcggtaacggcctgtttaaagctaacccgtcttctctgctttctacatgctatgagaaaaacgacccgcgtctggacggtgcattcaccatgtactacatgtccgtcaacatcggctctttcttctctatgattgctacgccgtggctggccgcgaaatacggctggagtgttgcgtttgcgttgagcgttgtaggcctgctgatcactatcgttaacttcgccttctgccaacgctgggttaaacagtacggtagtaaaccagacttcgagcctatcaactaccgtaacctgctgctgaccattattggtgttgtggcactgatcgctatcgccacctggctgctgcacaatcaggaagttgcgcgtatggcgctgggcgttgttgccttcggtatcgtggttatcttcggtaaagaagccttcgcgatgaaaggtgctgcgcgtcgtaaaatgatcgttgccttcatcctgatgctcgaagccattatcttcttcgtgctgtacagccagatgccaacgagtctgaacttctttgcgattcgtaacgttgagcactccattctgggtctggccgtagaacctgagcagtatcaggcactgaacccgttctggatcatcatcggtagtccgattctggccgctatctataacaagatgggcgataccctgccgatgccaaccaagtttgcaatcggcatggtgatgtgttctggtgcgttcctgattctgccgctgggtgcgaaattcgcgtctgacgctggtatcgtgtctgtaagctggctggtcgcaagctatggcctgcagagcatcggggaactgatgatctctggtctgggtctggcaatggttgctcaactcgttccgcagcgtctgatgggcttcattatgggtagctggttcctgaccactgccggtgcaaacctgattggtggttatgttgcgggtatgatggctgtgccggataacgttaccgatccgctgatgagtctggaagtctatggtcgcgtattcttgcagattggtgtcgctactgccgttattgcagtactgatgctgctgaccgcgccgaaactgcaccgcatgacgcaggatgacgctgcagacaaagcggcgaaagcagccgtagcgtaaaattcagggaaactcttttacaagccgctaacttttcgttagcggctttttttttgttcagcaacgcactaccatactttaaaccacagacaaaaggagttaccgatgaaattgttctacaaaccgggtgcctgctctctcgcttcccatatcaccctgcgtgagagcggaaaggattttaccctcgtcagtgtggatttaatgaaaaaacgtctcgaaaacggtgacgattactttgccgttaaccctaaggggcaggtgcctgcattgctgctggatgacggtactttgctgacggaaggcgtagcgattatgcagtatcttgccgacagcgtccccgaccgccagttgctggcaccggtaaacagtatttcccgctataaaaccatcgaatggctgaattacatcgccaccgagctgcataaaggtttcacacctctgtttcgccctgatacaccggaagagtacaaaccgacagttcgcgcgcagctggagaagaagctgcaatatgtgaacgaggcactgaaggatgagcactggatctgcgggcaaagatttacaattgctgatgcctatctgtttacggttctgcgctgggcatacgcggtgaaactgaatctggaagggttagagcacattgcagcatttatgcaacgtatggctgaacgtccggaagtacaagacgcgctgagtgcggaaggcttaaagtaatagccatcggcccacaggtcgttgtgggccgaaatgagatatttcagagctttgttgcgctgaagtaatgttctggtttggcaatacgatcctgagcagccaccacttgcagctcatattcctgcattgctttggtggtcaccatgatttcgtagactgcagcggtcacatgttccagcgcctcctgcagcgttgccccctgaagcagtttcaccagcagtaaaccgctcgtcacatcaccaacacctaccggctggcgcataccaaaatccaccagcggacggctgatatgccaggcttcatcggcggtgaccagcagcatttcaaaacggtcacggctgtagccagctcgcgccaggtgtttaaccaacacaatttgtggcccttgcgcaatgagttcgcgcgctgccagaaccgcttcttcgacgttatttaccgcatgctcacagagtatttccagctcaaccagatttggcgcaatgatatcgctggcaggcaaaccgtgccgcacatgaaactctgcgacacccggtgcaacgatacagcctttttccggatgacccattaccggatcgcaaaaatatttcgcctgcggattcgcggctttcacctgacggacgataccgaggatatgttcaccctgctccgcgcttcccagatagccacttaatacggcatcacaggtgtgtaatttatcaatggcggcaatgccttgcacaatttcggttaaatggctgggcggcatcacgcagccagtccatttgccgtattgggtgtgattagaaaattgaacggtgttcagcggccagacgttcgcgcccaggcggcgcatcggaaactctgccgcactgttacccgcatgaccataaacaacgtgagactggatagcgagaatatttttcatcatgttccctgtataaaaaccagggggagtgatttctcactccccctttccacttaatgcattatttccagcaaatcagacagtaattctttttaccgcgacgcagtaaggtaaaacgaccaaacagacgatcttcttctttaaagaagtattcaggatcggactgtttttcaccgttaatggtgatggcattggaggcgatagttttacgtgcctgaccacgggaaggttgcagttcagaatcgaccagtgcctgcatcaggtctgcgcccttttccatctcaaccatcggtacgccgtcctgcgccagctgttcgaagtccgcttcactcagcgcactcaaagaaccgctgaacaggcattcggtaatacgttttgccgcctgtaaaccttcttcaccgtgaaccagacgagtcacctgctccgccagtacatactgggcgcgcggtgctttaccgctgtttttatcttcttcttccagggcgttgatctcttcaatgctcataaaggtgaagaacttcaggaagcggtaaacgtcggcatccgcagtgttgatccagaactggtagaatttgtacgggctggttttcttcggatccaaccagactgcgccgccttcagttttaccaaatttggtgccatctgctttagtgatcagcggaacggtcaggccaaacacctgattctgatgcagacgacgggtcaggtcgataccagaagtgatgttaccccactggtcagaaccaccaatttgcagcaccacaccgtactgtttgttcagacaggcgaagtcataaccctgcaacaggttgtaggaaaactcagtgaagctaatcccctgatcttcacggttgagacgctgcttaaccgcttctttgttgatcatctggttaacggagaagtgtttgccaatatcgcgcaggaaggtcagcacattcatattgccgaaccagtcatagttgttcgccgcgatagcagagttttctccacagtcgaaatcgaggaacggggcaacctgcttacggattttgtccacccactcctgaacagtttcttcggtgttcagcttacgctcggcagctttgaagctcgggtcgccaatcagacccgtcgcgccgcctaccagcgcaaccggcttgtggcccgcctgctggaagcgtttcaggcataacaatggaacaagatgccccaaatgcaagctgtcagcggtaggatcgaagccgcaatagagcgcgatcgggccttgcgccagtcgctctgctaacgcttcctcgtccgtcacctgggctaccagcccccgctcttgcaattgtttaatcaagttactgcttgccatcaaaatctccatgtatataacgactgcacctttgccggtacacgacttttcgccagatgcgaaagagacatagaataaagtgccagaatcaggagtaccagcgattaaagcaagatttttgcatcttttcagggtgcaagacgatcaatcttccacgcatcattttcacgctggtacaaaaagcggtcatgcaggcgatgctcaccaccctgccagaactcaatctgttcaaggctgacgcgaaaaccgccccaaaagctcggcaatggcacttcgccctgttgaaacttctgcttcagctccaggaatttactttcaaggataccgcgggcagaaatgcgactggactgcttgctaacccatgcaccaatctggctatcacgcgggcggctatgaaaatatttcatcacttcgagagtgctaagtcgttctgctttaccgatcaccatcacctggcgctcaagggtatgccacgggaacagcaggctaacgcgcggattattttcgatttgatgtgctttacggctgccgaggttggtgtaaaacaccatgcctttttcgtcgtaatgtttgagtaaaacgatgcgctgataaggctgaccatgttcatccacggtagcgaccaccatcgcggtagggtccgccagtttggcttcacaagcctgagagagccaacgttcaaaaagggttaatggatcggcgggaagatcgcggcggcgtaacccgcctttggtgtattcacggcgcagatgcgcgatttgctgcaattcgtcgttatcagacatggttttctttacggattgtcagtgggtgacgctattgtgcgccgcccctggaaaaatctcaacgctgtggattttgtaactgacagttattcaagacgatgcggtcgcgtttatagacagtcgcttcatcgcctttgctccagaaaacatagattccgtcagtgtaacgcgcgccagaggcactaatgccctgtttgagatgcagtagttgattatcgtaaacaaaactgacctcctggcgcggattattcagtttgaccgtcaacggtttttcatcacactggtattccagcgtatcggtttgcatgcgctcaaccagctgattaaaggcgctacagccggagagaaggaccggcaaaatgataattaacagttttttcatagtcatatcccgaagactttcctggtctggagggcaatacgccctccctaacgttccaagtgtaacggcagacgcggtaagaaaaattcagttaactctgatatcacgggttagcggggaaaatagcccccagtaccgtctcctggcttgcgccagtgacggaaggcagatttcctggtaatcccgccagcgtccgccaggcaagccaggcgaaagccaatgcttccatgtcatcgccactaatgccaacggcatcggtggtggtgacttctgtgcctggcagtaatgccgccagacgcgccatgagtagcggattacgactacctccaccacataccatcaatcgttcgcagccaccgctcaacaaaacttgttcagaaatggtcacggcggtgagttctgccagtgtcgcctgcacatctcggggatcaacacccggaaaatggcgcaaatggcgctccagccaaccatagttaaagtattcgcgtccggtgcttttcggtgcaggttggctgaaatacgggtcgctgagcatattttgcagcagtgggagaataactttacccgcccgtgcccactcggcatctttatcgtaaggtttaccggcctgacgccagatccaggcatccatcagcatgttaccaggaccggtatcgtagcccccaaccggctgcccaggaatgagcagactcagattggcgatgccgccaatattgagcaccattcgtcgctcggttgggtgagccagcagcgcatgatggaacgcaggtaccagcggtgcgccttgtcctcccaaggcaatatcgcgacggcgaaaatcaccgacaaccgtaattccggtgcgtgccacaatttgattgttatcgccaatctgtaaagtgtgtggtgccacgcccgtcggttcatgccagacggtttgaccgtgacaaccgatcgcaactatatctcttgcctgcagattttgttccttaagcaaggcattgaccgcatcagcaaaaagttgcccgagttgagtatcaagctgtccaaactggctaagtgtaagctgctggccctggcaaatatccagtacagcctgtttcagagataccgggatcggccaactcaaacttgccagctgtgcgacccggtgttcatcaattgtcgccaacacaacatcaacaccatcaaggctggtgccactcataacgccaataaagcggccgcttttcatagttcatcctttttcaatctgacgtttgcgcaccactcaaacataaacttttcgtgaataccatgcggaatgaccgatttttaccgttggtagtaaaacattatcttcaaatcaataatcatcatgaatgttttgtttataattggttgatcctactttcattatgatttgctcatatttggtagaacatgtaaccatggattcacatatgccatatactttgaccatgagggatgcttgcgtggcgtttcatggtgaacaggagatttttcaatgattaaacgcgtattggttgttagtatggtaggtctgtctcttgtcggttgtgttaataacgacaccctgagtggggatgtttataccgcttctgaagcgaaacaagtacagaatgtcagctatggcaccatcgttaacgtacgtccggtacagattcagggcggtgatgattccaacgttatcggtgcaattggcggtgctgttcttggtggtttcctggggaatactgttggtggcggaaccgggcgttctctggctactgcagcaggcgctgttgcaggtggcgtagctggtcagggcgtacagagtgcaatgaacaaaacgcagggtgtcgagctggaaattcgtaaagacgatggtaataccatcatggtggtacagaaacaaggcaacactcgtttctctccgggccaacgtgtcgtactggccagcaatggcagtcaggtgaccgtttctccgcgctaaataagtttgcgtgtggtcaggttactgaccacacgcccccttcatttcaccctttggcctgtaactcaatgatattatgctcaagttttgcgatgagcgtaatcagttgctccagttcctctgcggagatgccatgtaatatttccgcgcgggttttgttaataacagcttccatttcgctgatcagcggctctgccttttccgtcagtttaatacgtttagcccgacgatcgctggcacaagtttgacggctaattaaccctttttcttccagttggtccagagtacggaccagacttggctgctcgatgccaatcgcttttgccagttgaatttggctctggtctggaggtaactgatggatattgtgtaacgtaacccaatgggtttgtgttaactccagcggtttcaggcgatggtctatcagagcacgccatatgcgcaccaaccgtgccagatcagaacctagtgggctttccaatttcatctccttataattagcttgctaagatattatgcggcttttagaatagtgtgcagcaattgtattgctaaaacaaatgtattgctgcatttggttaccgtcagacatatttttcagaaattgcgcgtaaatttttcgcacttaaagaatatttattaatctaacgcaatatattcggtcgtaaaggaatctactttgtgaagtttatgctcaatgcaacaggattgcccttacaagatctggtgttcggtgcgtccgtctactttcctccgtttttcaaagcattcgcgtttggattcgtcatctggcttgtcgtacaccgcctgcttcgtggctggatctacgccggtgacatctggcatcccttgttaatggatttaagcctgtttgcgatttgcgtttgccttgctctggcaatactgattgcgtggtaactatgagtattaaaacaattaagtatttcagtacaatcattgtagcggtagttgcggttcttgccggatggtggctgtggaattattacatgcaatctccgtggacacgcgacgggaaaatacgcgcagaacaggtttctatcaccccacaggtgagcggacgtattgttgagctgaatataaaagacaaccagctggttaacgcgggggatcttctgctcacgatcgataaaacgccctttcagatcgccgagctgaacgcacaggctcagctggcgaaagcgcaatctgacctcgcaaaagccaataacgaagcgaatcgtcgtcgtcatctcagtcaaaattttatttctgccgaagaactcgataccgctaacctcaatgttaaagcgatgcaggccagtgttgatgccgcacaggcgacgctgaaacaggcacaatggcaactggcgcaaacggaaattcgcgccccggtgagtggatgggtgactaaccttactacccgcatcggcgattacgctgataccgggaaaccgctgtttgcccttgtcgacagccacagcttttacgtcattggttattttgaagaaaccaagttgcgccatatccgcgaaggtgcaccagcacaaattaccctctatagtgataacaaaacgttacagggtcacgtttccagtatcggtcgggcgatttatgatcagagcgttgaaagtgacagtagccttattccggatgttaaacctaacgtcccctgggttcgactcgcccaacgcgttcccgtccgctttgcgctggataaagtcccaggcgatgtcacgttggtgagcggcaccacctgtagcattgccgtaggtcaataatgaacgcaagcagttggtccttgcgcaatttgccctggttcagggccacgctggcgcaatggcgttatgcgttacgcaataccattgccatgtgtctggcgctgacggttgcctattatttaaatctggatgaaccctattgggcgatgaccagcgctgcagtggttagctttcccaccgttggcggtgttatcagcaaaagcctcggacgcatcgctggcagtttgctcggagccattgcggcactgcttcttgccgggcatacgctcaatgagccgtggttttttctattgagcatgagcgcgtggcttggcttttgtacctgggcctgtgcgcacttcacgaataacgtcgcgtatgcatttcaactggcgggctacacggctgccatcatcgcctttccgatggttaatattactgaggccagccagctgtgggatatcgctcaggcgcgcgtttgcgaggtaatagtcggtattttgtgcggcggcatgatgatgatgatcctgccgagcagttccgatgctactgcccttttaaccgcattgaaaaacatgcacgcccgattactggaacatgccagtttactctggcagcctgaaacaaccgatgccattcgtgcagcacatgaaggggtgattgggcagatactgaccatgaatttgctgcgtatccaggctttctggagccactatcgttttcgccagcaaaacgcgcgccttaatgcgctgctccaccagcaattacgtatgaccagtgtcatctccagcctgcgacgtatgttgctcaactggcccagtccgccaggtgccacacgagaaattctcgaacagttgctgacggcgctcgccagtagccaaacagatgtttacaccgtcgcacgtattatcgccccgctacgcccgaccaacgtcgccgactatcggcacgtcgccttctggcagcgactacgttatttttgccgcctttatctgcaaagtagtcaggaattacatcgtctgcaaagcggtgtagatgatcataccagactcccacggacatccggcctggctcgtcataccgataacgccgaagctatgtggagcgggctgcgtacattttgtacgttgatgatgattggcgcatggagtattgctagccaatgggatgccggtgccaatgcattaacgctggcagcaattagctgcgtactctactccgccgtcgcagcaccgtttaagagcttgagtcttctgatgcgcacgctggtgttacttagcctattcagctttgtggtcaaatttggtctgatggtccagattagcgatctgtggcaatttttactgtttctctttccactgctggcgacaatgcagcttcttaaattgcagatgccaaaatttgccgcattgtgggggcaactgattgtttttatgggttcttttatcgctgtcactaatcccccggtgtatgattttgctgattttcttaacgataatctggcaaaaatcgttggcgtcgcgttggcgtggttagcgttcgccattctgcgtccaggaagcgatgctcgtaaaagccgccgccatattcgcgcgctgcgccgggattttgtcgatcagctaagccgccatccaacactgagtgaaagcgaatttgaaagcctcacttatcatcacgtcagtcagttgagtaacagccaggatgcgctggctcgccgttggttattacgctggggtgtagtgctgctgaactgttctcatgttgtctggcaattgcgcgactgggaaagccgttccgatccgttaagccgagtacgggataactgtattagtctgttgcggggagtgatgagtgagcgtggcgttcagcaaaaaagtctggcggccacacttgaagaattacagcggatttgcgacagccttgcccgtcatcatcaacctgccgcccgtgagctggcggcaattgtctggcggctgtactgcagccttagccaacttgagcaagcaccaccgcaaggtacgctggcctcttaattacttaattacaccacaggcatagcgttcaccgccaccgcccagcggtttaggttgatcggacatattatcgccgccaacgtggaccatcagcgctttgtctttgatttcatccagacttttcagacgaggcgcgatgacggcatcggtagctttgccgtcattattgacgaccagtgcaggcagatcgcctaaatgcccggcaccttctggcccttcatgtttaccggtattttgtggatcaagatgcccgcctgcggattccgcggcgctggctttgccatctttggtggctggctggcagcttcctttggcatgaatatggaagccatgttcaccggggggtaatgctttcagatcggggctaaactccagacctttatcggtttcagtaatggtgacgctaccaatactctgccctaccccttggctcgtgacgaggttcatctcgactttttcactggcagcttgtgcgccggttgcaacaaccagcgccagaatagccagactaaaacgtttcataggacctccgttcattgtgcattcctgaataagtgtaaaccagtgacacatttttgaacggcggctattcctaaaagtgcttacggtacgtcgtaccccagtgccgctttacggatacgaaaccattgttgacgggtcattttcagtgtttctgcttcgacagctgcccgtacgcgctcaattttaccactaccgataattggcagcggctggcttggtaaacgtaatacccaggcgtaaaccacctgttcaatgctgcccgcgtttaactcctctgccaccacagccagttcatcacgcagcggctggaaataatcatcattaaacagacgaccaccaccaaggcaggaccacgccatcggacgaacacgcagttgttgtagttggtcgagcgtgccatccagcagtaacggctgatgcaccggggatatttccacctgattagtggcaagggtaaacggcagacgactttgcaacagggcaaattgcgcaggcgtaaagttgcttacgccaaaatgacgcactttgccgctctgatgcagatgtttgaacgcgtccgccacttcatcggcatccattaacgggtctggtcggtggattaacagcaaatccagatgatcggtcgcgagattaattaggctctgttcggcgctcttaatgatgtgatcgcggtcagtgatgtaatgaccaatgacgttttcttcacgcgcggtcgtcgcgataccgcatttactgacgatttccatccgttcacgcaggtgaggtgccagtttcagtgcctcgccaaacgccgcttcgcactgatagccaccataaatatcagcatggtccacggtggtcacgccgagatccagatgctcttcaataaaactgaccagctggcgggcggacatattccagtccatcaatcgccagtagcccatcacaaaacgggaaaactccgggccttgcggcgcaatagtaatacgctgaaccataatcgcttcctcttatcagatatgagaggagtatacgcaagattaggttcaaaagagacttggttgctccggttcgtcactactcgctggcttatttgcgcgtaatttgcgcattaatcgctgccgacaaaggcgcagcacctcttgtttttcgccatcgctcattttattccagttaaaacgctcatcacgactacgaaaacagccgcgacaaaacccgcgttcgtcagactggcaaattccccggcacgggctctggacgggaaagaactctaattgctccgccacttcgccctcctcagataagattattaccattattgaagctgttaatgtccaaagtagcaactttgcttgcactagaccgactggtctactacactccaacgcatgaacaaacacaccgaacatgatactcgcgaacatctcctggcgacgggcgagcaactttgcctgcaacgtggattcaccgggatggggctaagcgaattactaaaaaccgctgaagtgccgaaagggtccttctatcactactttcgctctaaagaagcgtttggcgttgccatgcttgagcgtcattacgccgcatatcaccagcgactgactgagttgctgcaatccggcgaaggtaactaccgcgaccgcatactggcttattaccagcaaacactgaaccagttttgccaacatggaaccatcagtggttgcctgacagtaaaactctctgccgaagtgtgcgatctgagtgaagatatgcgcagcgcgatggataaaggtgctcgcggcgtgatcgccctgctctctcaggcgctggaaaatggccgtgagaaccattgtttaaccttttgtggcgaaccgctgcaacaggcacaagtgctttacgcactgtggcttggcgcgaatctgcaggccaaaattagccgcagtttcgagccactggaaaacgcgctggcccatgtaaaaaacattattgcgacgcctgccgtttaacaggcattttttatcaccagacgaccgggagcctttatgagttctgaaaaactgtattccccactgaaagtgggcgcgatcacggcggcaaaccgtatttttatggcaccgctgacgcgtctgcgcagtattgaaccgggtgacattcctaccccgttgatggcggaatactatcgccaacgtgccagtgccggtttgattattagtgaagccacgcaaatttctgcccaggcaaaaggatatgcaggtgcgcctggcatccatagtccggagcaaattgccgcatggaaaaaaatcaccgctggcgttcatgctgaaaatggtcatatggccgtgcagctgtggcacaccggacgcatttctcacgccagcctgcaacctggcggtcaggcaccggtagcgcctagtgcacttagcgcgggaacacgtacttctctgcgcgatgaaaatggtcaggcgatccgtgttgaaacatccatgccgcgtgcgcttgaactggaagagattccaggtatcgtcaatgatttccgtcaggccattgctaacgcgcgtgaagccggttttgatctggtagagctccactctgctcacggttatttgctgcatcagttcctttctccttctagtaaccatcgtaccgatcagtacggcggcagcgtggaaaatcgcgcacgtttggtactggaagtggtcgatgccgggattgaagaatggggtgccgatcgcattggcattcgcgttagtccaatcggtactttccagaacacagataacggcccgaatgaagaagccgatgcactgtatctgattgaacaactgggtaaacgcggcattgcttatctgcatatgagtgaaccagattgggcggggggtgaaccgtatactgatgcgttccgcgaaaaagtacgcgcccgtttccacggtccgattatcggcgcaggtgcatacacagtagaaaaagctgaaacgctgatcggcaaagggttaattgatgcggtggcatttggtcgtgactggattgcgaacccggatctggtcgcccgcttgcagcgcaaagctgagcttaacccacagcgtgccgaaagtttctacggtggcggcgcggaaggctataccgattacccgacgttgtaatccaacattgcgagcggcgtaaagccgccgctatactaaaacaacattttgaatctgttagccattttgaggataaaaagatgcgtcttcttcataccatgctgcgcgttggcgatttgcaacgctccatcgatttttataccaaagtgctgggcatgaaactgctgcgtaccagcgaaaacccggaatacaaatacagtctggcgtttgttggctacggcccggaaaccgaagaagcggtgattgaactgacctacaactggggcgtggataaatacgaactcggcactgcttatggtcacatcgcgcttagcgtagataacgccgctgaagcgtgcgaaaaaatccgtcaaaacgggggtaacgtgacccgtgaagcgggtccggtaaaaggcggtactacggttatcgcgtttgtggaagatccggacggttacaaaattgagttaatcgaagagaaagacgccggtcgcggtctgggcaactaatctcctgccgggcgtgaactcatcgcgcccgcatctttactgcatcgacaagtaatatttgtcataatgcgcgctgcaatttatccgtattaagagaatcagatgtccgataacgctcaacttaccggtctgtgcgaccgttttcgtggtttttatcctgttgtgatcgatgttgaaacagccggatttaacgccaaaaccgatgcgctgcttgagattgccgccatcaccctgaaaatggatgaacaaggctggctgatgccggacaccacattacatttccacgtcgaaccatttgtcggcgcaaatttgcaaccagaagccctcgccttcaacggcattgacccgaacgatcccgatcgcggcgcggtcagcgaatacgaggcgctgcacgaaatttttaaagttgtacgtaaaggtattaaagcgagcggctgtaaccgcgccattatggtggcgcacaatgccaattttgatcacagctttatgatggccgccgcagaacgcgccagtctgaaacgtaacccgttccaccctttcgccacttttgacactgctgcactggccgggctggcactcggacaaaccgtattgagtaaggcttgccagaccgctggcatggacttcgacagcacccaggcgcactccgcgctgtacgacaccgaacgcactgctgtgctgttttgtgaaatcgtcaaccgctggaaacgtctgggaggctggccgctatctgccgccgaagaggtgtaatcgagtcgatgcctgatgacatgcaatgattcaggcatctatagtgaggctattccacgcatcctgcatgatattcacggggaatagcgttaatggcagataatccagaccctagtagcctcctgccggacgtgtttagtccggcgacccgcgactggtttcttcgcgcctttaaacagccgaccgctgtccagccgcaaacctggcatgtggcggcgcgaagcgaacatgcgctggtgattgcaccgaccggctccgggaaaacgctggcagcatttctctacgccctcgatcggctcttccgcgaaggcggcgaagatacccgcgaggcgcataagcgtaaaaccagtcgcatcctctatattagtccgataaaagccctgggcaccgacgttcagcgcaacttgcagatcccgttgaagggtattgccgatgaacggcggcggcgcggcgaaacggaagtcaatcttcgcgtagggatccgtactggcgatacgcctgcacaggaacgcagcaaactcacccgtaatccgccggatattctgatcaccacacccgaaagtctctatctgatgctgacctcccgcgcgcgcgaaacgctacgcggcgtcgaaacggtaattattgatgaagtccacgcggtagcgggcagtaaacgtggtgcgcatctggcgttaagtctggagcggctcgatgcgctgctccacaccagtgcacagcgaattggcctttctgccactgtgcgcagtgccagcgatgtggcagcatttcttggtggcgatcgcccggttacggtagtcaacccgcccgcaatgcgccatccgcagatacgaattgtcgtaccggtcgccaatatggatgatgtcagtagcgtcgccagcggcaccggcgaagacagccatgccggccgggaaggctccatctggccatatattgaaacgggtatccttgatgaagtgttgcgccatcgcagcaccattgtctttactaatagccgggggctggcggaaaaactgacggcacgattaaatgagctttacgccgcacgcttacagcgttccccgtctatcgccgttgatgcggcccatttcgagagcacctccggcgcaacctctaaccgtgtacaaagtagcgacgtttttattgcccgcagtcaccacggctccgtctctaaagaacaacgagcaatcaccgaacaggcgctgaaaagcggtgaattacgctgcgtggtcgcaacctccagtcttgaactggggattgatatgggcgcggtggatctggtgattcaggtggcaacgccgctttctgttgccagtgggttacaacgcattggtcgcgccggacatcaggttggcggtgtatctaaagggctgtttttcccccgtacccggcgtgatttagtcgattccgcagtcattgtagagtgtatgttcgcaggcaggctggaaaacctgacaccaccgcataatcctctcgacgtccttgcgcagcaaaccgttgccgccgcggcgatggatgcattacaggtagacgaatggtactcccgcgtacgccgtgccgcaccgtggaaagatctgccaagacgtgtttttgacgccacgctggatatgctttccgggcgctatccctctggcgatttttctgcttttcgccccaaactggtctggaacagggagaccgggatattgaccgcccgacctggcgctcaattgttggcggttaccagcggcggcaccattccggatcgtggcatgtatagcgtgttattacccgaaggtgaagaaaaggccggtagccggcgggtgggtgaactggatgaggagatggtatatgagagccgggtgaacgacattatcactctcggcgctaccagttggcggatccagcaaatcacccgcgatcaggtgattgtgactcctgctccgggtcgttctgcccggctccccttctggcgtggtgaaggtaacggacgtccggctgaattaggcgagatgatcggcgattttcttcatttgctggcggatggcgcgttcttttccgggactattcccccgtggctggcagaagaaaatacgatcgccaatattcaggggttgattgaggagcagcgcaacgcgacgggcatcgttccggggagtcgccatctggtcctcgaacggtgccgtgatgaaattggtgactggcgtattattttgcactctccctatggaagacgggtgcatgaaccctgggcggtggcgattgccgggcgaatacatgcgctatggggcgctgacgcgagcgtggtcgccagtgatgacggcattgttgcacgtattcctgacaccgatggtaaattgcccgatgccgcgatttttttgtttgaaccagaaaagttgctgcaaattgtccgcgaggcggtaggcagcagcgcacttttcgccgcccgttttcgcgaatgcgccgcgcgggcattattaatgccggggcgcactccgggccatcgcaccccgctttggcaacaacggctgcgcgccagtcagttgctggaaatcgctcagggatatccggattttccggtcattctcgaaaccctacgcgaatgtctgcaagatgtttatgatcttcccgcactggaacgtttgatgcgtcgcctgaacggtggcgaaattcaaatatccgatgtaacgaccactacgcccagccctttcgccacaagtttattgttcggctatgtcgcggaatttatgtaccagagcgacgccccgctggcagagcgccgggcatccgtactgagcctggacagcgagttactgcgcaatctactcggacaggtcgatccgggggaattactcgacccgcaggtcattcgccaggtggaagaagagttgcaacgactggctcctggcagaagagcgaaaggtgaagaaggattgttcgacctgctgcgcgaactggggccaatgaccgttgaagacctggcgcaacggcatacaggcagcagtgaagaggttgcgagctatctggaaaatcttcttgcagtaaaacgaatcttcccagcgatgattagcggacaggagcgtcttgcctgtatggatgatgccgccaggctgcgtgatgccctcggcgtacgactaccagagagtttgccagagatttatttacatagagtcagttacccgcttcgcgacctctttctgcgctatctccgggctcatgctctggtcacggctgaacaactggctcatgagtttagtctcggtattgccattgtcgaagagcagcttcagcaactgcgtgaacagggtctggtgatgaatctgcaacaagacatctgggtgagcgatgaagtatttcgtcgtctgcgtttgcgcagcctgcaagccgccagagaagcgacgcgtcccgttgcagccacgacctatgcgcgattgctgctggaacgtcagggcgtattacccgccaccgatggtagcccggcgctctttgccagtacaagcccaggcgtttatgagggcgtagatggcgtgatgcgggtgatcgaacagcttgccggagtcggtttacccgccagtctctgggaaagccagatcctgcctgcccgcgtacgcgactatagcagtgaaatgctcgatgaattactggcaaccggtgcggttatctggagcgggcaaaaaaaactgggtgaagatgacggcctggtggcactgcatctacaggaatatgctgcagaaagcttcactcccgccgaagcggatcaggcgaatcgtagcgcgctgcaacaagcgatagtcgctgttctggctgacggaggagcctggtttgcacaacaaatcagccaacggatacgcgacaaaatcggcgaaagcgttgatctctctgccctgcaagaggcgttatgggcgctggtctggcaaggcgtcatcaccagcgacatttgggcaccgttacgcgccctcacccgcagcagttccaacgcacgcaccagtactcgccgcagtcaccgggctcgtcgtggacgtcctgtctatgcgcaacccgtcagcccgcgggtatcttacaacacaccaaatctggctggacgctggagcttattgcaggtggagccactaaacgataccgaaaggatgctggcgctggcggaaaatatgctcgaccgctacggcatcatcagtcgtcaggcggtgatagccgaaaatatccctggcgggtttccaagcatgcaaacgctttgtcgaagtatggaagactccgggcgaattatgcgaggtcgttttgtagaaggtctgggtggcgcgcaattcgctgaacgtctgactattgaccgattgcgcgatctggcgacacaagccacgcaaacgcgccactatacaccagtggcgctctctgccaacgatccggctaatgtgtggggaaatcttctgccctggcctgcacatccggcaacgctggttccaacgcgtcgggcgggtgcgctggtggtcgtttctggcggcaaattgttactctatctggcgcaaggtggcaaaaaaatgctggtctggcaggaaaaagaggaattactcgccccagaggttttccacgcgctgactaccgcactgcgtcgcgaaccacggctgcgctttacgctaacagaagtgaatgatctaccggtccggcaaacgccgatgtttacgctgctgcgtgaggcgggatttagtagtagcccacaagggctggattggggataaagaaaggactgacggatgcccgttcgcatccgtcagtattgcaggacggattattccgcgtccggctcttcagacttgtatttagcggcagtttctttgatcagctgctgcagttcgccacgctgatacatttcgatcacgatatcacaaccgccgaccagctcgccgtcaacccacagttgcgggaaggtcggccagttagcatatttcggcagttccgcacgaatgtccggattctgcagaatatcaacataggcaaaacgttcgccacatgcggcaagcgcctggactgcctgggcagagaaaccgcagctcggcagtttcggactacctttcatgtacagcaggatcgggttttcagcaatctggcgttggattttttcgatagtggtgctcattgtcttgcttcctcaaacttctttacggcagtaatctgacattgtagcgggtcagtgcggcatcggaaaataacattttcatcacgcttttgctattttatccctttgctctatttgttgcatttcaaatattcgtttcttctctgatgccggcaaactggcgtatttataaccatttttagctttcactgctgcatttttttgcgctcgccaacgaaacgtattttttaacaataaaagctattaactttctcttcttctatgcattagaatcatcaagttttgtaaatcagacgcaggcatgatagacctgcctttacagagggacgctcagtggcgcggataaaccgtattagcatcacgctctgtgctttactttttaccaccctgcctttaacgcctatggcccatgctagtaagcaagccagggagagttctgctaccactcatatcaccaaaaaagcagataaaaagaaaagcacggcaaccaccaaaaagacccagaaaacagcgaaaaaagccgccagtaaaagtacgaccaaaagcaaaaccgcttcttccgttaaaaaatcttccattaccgcttctaaaaacgccaaaactcgcagcaaacacgccgtcaataaaacggccagtgccagctttaccgaaaagtgtaccaaacgtaagggctataaaagccattgtgtgaaagtcaaaaatgccgcgagtggaactcttgccgacgcgcacaaagcgaaggtgcaaaaagctacgaaagtggcaatgaataaactgatgcagcaaattggtaagccatatcgttggggtggcagcagtccgcgtaccggttttgattgcagcggcctggtttattacgcttataaagatttggtgaaaattcgtattccgcgtacggcgaatgaaatgtatcacctgcgtgatgcagcgccaatcgaacgtagtgaactgaaaaacggcgacctggtctttttccgtactcagggacgcggcacagccgatcatgtcggcgtgtatgtcggcaacggcaaatttattcagagtccgcgcacaggtcaggaaattcaaatcacttctctcagtgaagactactggcagcgccactatgttggcgctcgtcgggtaatgaccccaaaaacacttcgctaaaactttaccctgttgttacggcaacagggtaagttcatcttttgtctcaccttttaatttgctaccctatccatacgcacaataaggctattgtacgtatgcaaattaataataaaggagagtagcaatgagtttcgaattacctgcactaccatatgctaaagatgctctggcaccgcacatttctgcggaaaccatcgagtatcactacggcaagcaccatcagacttatgtcactaacctgaacaacctgattaaaggtaccgcgtttgaaggtaaaagtctggaagagattattcgcagctctgaaggtggcgtattcaacaacgcagctcaggtctggaaccatactttctactggaactgcctggcaccgaacgccggtggcgaaccgactggaaaagtcgctgaagctatcgccgcatcttttggcagctttgccgatttcaaagcgcagtttactgatgcagcgatcaaaaactttggttctggctggacctggctggtgaaaaacagcgatggcaaactggctatcgttagtacctctaacgcgggtactccgctgaccaccgatgcgactccgctgctgaccgttgatgtctgggaacacgcttattacatcgactatcgcaatgcacgtcctggctatctggagcacttctgggcgctggtgaactgggaattcgtagcgaaaaatctcgctgcataataactgatggcaaatgcagcattgcctgaagcgctacgcttatcaggcctacgcggatcatcgatgtaggtcggataaggcactcgccgcatccggcaagataaatcgcacgttgtcagcaactgtaacgcagaaggttatccttctgcgtttttgtttaattagctgttagcaacgcaaactgtttcaggttgttttctggcactcataaacaccagcaataatgccagtcccgcgacaatcgctcccatcaccggcacaaagctgtatcccagcccagcggaaattaccgcaccaccagcagctgctcccagcgcatttccaagattaaaggcaccaatattgacactactagacagacctggcgcttcactggcgacacgcatcacgcgcatctgtaacggcggtacgaccgcaaaggttgctgcgccccacaccaccatgctaatagctgcgccgaactcattgcgggccaggaacgggattgccagcataatcaccatcaacaacaacaaaaagcctttcaacgtgccgttaacactacgatctgccagtttgccgccgagatagttaccgatagagaatccgacaccaatcagcaccagcattgccgtgacgaacaccggtgttgcgtgggtaatactttgcagtaccggagagatataggtgtagagagtaaacattgcaccagctcccagtaccgtcgtcagcaatgcagacagcacctgcggacgcattaataccgccagctcttttttcacttcaggtcgtgcccctgcaccacctttaggtaaactgaagaacagacttaccatactaatcactcccagccccgccgttgccagaaaactcatccgccagccgatggtttcacccaaccaggtcgccgccggcacgccaccgatatttgccagggttaaccccataaacatagtggcaactgcgctggcctgtttatgttttggcaccacgcttgcggccacgacactacccaaaccaaaaaatgctccgtgattcaggctggtcaaaatgcgactaagcatcagggtcatataatccggcgcgatggcggaaagtacgttgccgagcgtgaaaattgccatcaggaaaatcaacgcactgcggcgggcacgatgagaaagtagaagcgtcatcagcggcgcgccaaccattacgccaactgcataggcactgattaacattccggcagcgggaatgctgacatccacaccgcgcgcaatgacgggcaacaagcccattgggctgaactccgttgtcccgataccaaacgcgccaatcgccagcgccagcaacggatagttaattttcatgccttatctccacctcttcgcgtcattacgcgatattcattaaagtggcgaaagcatgacagcaatcacaaaaaaatgaaaataacaaaaagagaaaacacttttgccattttgctaacaaacaggaaggagatgcgagggagaacgcgctccctcgagaggaaatcagtgcagcgcggcagtcaaacccacggctacgatcaaaccgaggacgataatcgttgttaccagtgaaaatttaaggtcggtgctcatcaagttttctccttttttattaccacacaaaaagtgatattacgcatttttacacactgtgatgaaaaaatctcccgtcatttataatgataagtgtttttaccacttccccttttcgtcaagatcggccaaaattccacgcttacactatttgcgtactggccattgaccccttcctgacgctccgtgtcgtttttccggcgtaccgcaacacttttgttgtgcgtaaggtgtgtaaaggcaaacgtttaccttgcgattttgcaggagctgaagttagggtctggagtgaaatggaatggcaacaataaaagatgtagcgaaacgagcaaacgtttccactacaactgtgagtcacgtgatcaacaaaacacgtttcgtcgctgaagaaacgcgcaacgccgtgtgggcagcgattaaagaattacactactcccctagcgcggtggcgcgtagcctgaaggttaaccacaccaagtctatcggtttgctggcgaccagcagcgaagcggcctattttgccgagatcattgaagcagttgaaaaaaattgcttccagaaaggttacaccctgattctgggcaatgcgtggaacaatcttgagaaacagcgggcttatctgagcatgatggcgcaaaaacgcgtcgatggtctgctggtgatgtgttctgagtacccagagccgttgctggcgatgctggaagagtatcgccatatcccaatggtggtcatggactggggtgaagcaaaagctgacttcaccgatgcggtcattgataacgcgttcgaaggcggctacatggccgggcgttatctgattgaacgcggtcaccgcgaaatcggcgtcatccccggcccgctggaacgtaacaccggcgcaggccgccttgccggttttatgaaggcgatggaagaagcgatgatcaaggtgccggaaagctggattgtgcagggtgactttgaacctgaatccggttatcgcgccatgcagcaaatcctgagccagccgcatcgccctactgccgtcttctgtggtggcgatatcatggcaatgggcgcactttgtgctgctgatgaaatgggcctgcgcgtcccgcaggatgttagcctgatcggttatgataacgtgcgcaacgcgcgctattttacgccggcgctgaccacgatccatcagccaaaagatagcctgggtgaaacagcgttcaacatgctgttggatcgtatcgtcaacaaacgtgaagaaccgcagtctattgaagtgcatccgcgcttgattgaacgccgctccgtggctgacggcccgttccgcgactatcgtcgttaatcacccgttgcgggagtctcttccggctcccgcagccactccttattcagcgtctcactatcgccgagatactcaagcaaccaggttaacgcagggctcatatcattttgctgccatgtcagacaacatgcgctatccggaaaggggttttccagttctaatgctacccacttcccctcattaagccacggtttggcgaaatgtgttggcaccatccctatgcataatcctgcgctgatacaggttgcgctactttcccagtcaggcacgacaactcttttttggttatccagcaaccaggtaatacgtttaggtagcgttcggctggtgtcttcgcgcaccaagctcggccagttgcgcaacgtatcatcgctgaacgggccatccatcaacgccagcgggtggtgactggcaacaacgcaactccagcttagcatccccatatcccggaaggcataacgaccgcctaccggaatcgcgcgtgttgcgccaatcgccagttccacgcgcccgtcggaaagcgcatcccagacaccgttgaacacttcctgaaagacaagaagttcgacatcatcaaaatggcgataaaaatcaacgatcatctgccgtgtacgttctggcctgacaatattatccactgcgatagctaactgaccgcgccagccgttcgctatctgctgacattgctggcgggtgatctgcatttttttgacaacagagcgcccttctttgagaaaccacgctccagcagcggtcagctccacatcacggtgccgtcgttcaaagagcggcaccgccagccactcttccagctgacgcacggtatagctgaccgcagaaggaacgcgatgcagctcctgtgccgcagcgctaaaactaccattacgcgctaccgcatcaacaacttcgagactatattcactccacatagtctgcctgcaaaatttttgaaaccagtcatcaaatattaccgtttcacaacactaatttcactccctacactttgcggcggtgtttaattgagagatttagagaatatacatgcaacctgggaaaagatttttagtctggctggcgggtttgagcgtactcggttttctggcaaccgatatgtatctgcctgctttcgccgccatacaggccgacctgcaaacgcctgcgtctgctgtcagtgccagccttagtctgttccttgccggttttgccgcagcccagcttctgtgggggccgctctccgaccgttatggtcgtaaaccggtattattaatcggcctgacaatttttgcgttaggtagtctggggatgctgtgggtagaaaacgccgctacgctgctggtattgcgttttgtacaggctgtgggtgtctgcgccgcggcggttatctggcaagcattagtgacagattattatcctagtcagaaagttaaccgtatttttgcggccatcatgccgctggtgggtctatctccggcactggctcctctgttaggaagctggctgctggtccatttttcctggcaggcgattttcgccaccctgtttgccattaccgtggtgctgattctgcctattttctggctcaaacccacgacgaaggcccgtaacaatagtcaggatggtctgacctttaccgacctgctacgttctaaaacctatcgcggcaacgtgctgatatacgcagcctgtagtgccagtttttttgcatggctgaccggtagtccgttcatccttagtgaaatgggctacagcccggcagttattggtttaagttatgtcccgcaaactatcgcgtttctgattggtggttatggctgtcgcgccgcgctgcagaaatggcaaggcaagcagttattaccgtggttgctggtgctgtttgctgtcagcgtcattgcgacctgggctgcgggcttcattagccatgtgagcctggtcgaaatcctgatcccattctgtgtgatggcgattgccaatggcgcgatctaccctattgttgtcgcccaggcgctgcgtcccttcccacacgcaactggtcgcgccgcagcgttgcagaacactcttcaactgggtctgtgcttcctcgcaagtctggtagtttcctggctgatcagtatcagcacgccattgctcaccaccaccagcgtgatgttaagtacagtagtgctggtcgcgctgggttacatgatgcaacgttgtgaagaagttggctgccagaatcatggcaatgccgaagtcgctcatagcgaaagtcactgatctatatcgatatacttatacttaggctgctaacaaaattttgttgtatgattgaaattagcggcctatactaatttcgagttgttaaagctacgataaatattatgtttttacggggacaggatcgttcccgactcactatggatagtcatttcggcaagggttcctcctttccctctgttctacgtcggattatagactcgcggttttttctgcgagatttctcacaaagcccaaaaagcgtctacgctgttttaaggttctgatcaccgaccagtgatggagaaactatgagtagtagctgtatagaagaagtcagtgtaccggatgacaactggtaccgtatcgccaacgaattacttagccgtgccggtatagccattaacggttctgccccggcggatattcgtgtgaaaaaccccgatttttttaaacgcgttctgcaagaaggctctttggggttaggcgaaagttatatggatggctggtgggaatgtgaccgactggatatgttttttagcaaagtcttacgcgcaggtctcgagaaccaactcccccatcatttcaaagacacgctgcgtattgccggcgctcgtctcttcaatctgcagagtaaaaaacgtgcctggatagtcggcaaagagcattacgatttgggtaatgacttgttcagccgcatgcttgatcccttcatgcaatattcctgcgcttactggaaagatgccgataatctggaatctgcccagcaggcgaagctcaaaatgatttgtgaaaaattgcagttaaaaccagggatgcgcgtactggatattggctgcggctggggcggactggcacactacatggcatctaattatgacgtaagcgtggtgggcgtcaccatttctgccgaacagcaaaaaatggctcaggaacgctgtgaaggcctggatgtcaccattttgctgcaagattatcgtgacctgaacgaccagtttgatcgtattgtttctgtggggatgttcgagcacgtcggaccgaaaaattacgatacctattttgcggtggtggatcgtaatttgaaaccggaaggcatattcctgctccatactatcggtagcaaaaaaaccgatctgaatgttgatccctggattaataaatatatttttccgaacggttgcctgccctctgtacgccagattgctcagtccagcgaaccccactttgtgatggaagactggcataacttcggtgctgattacgatactacgttgatggcgtggtatgaacgattcctcgccgcatggccagaaattgcggataactatagtgaacgctttaaacgaatgtttacctattatctgaatgcctgtgcaggtgctttccgcgcccgtgatattcagctctggcaggtcgtgttcagtcgcggtgttgaaaacggccttcgagtggctcgctaaaggctattctatcgccccctctccgggggcgatttcagatcaggcttctgtgcctggttgattcatggcattttctcgtgccgccagcacacgttctaccgtatctaccactgcctgagtttgtggatcgatttcaatgttgacgcgtgcgccaagttttttcttcccaagagtcgtgcgttccagtgtttcccgaattaaatggacgcaaaaacgcgttggcgtgacttcgccgacggtcaggctaataccgtcgatgccaataaatcctttgtacagaatatatttcatcaactgactatcctggactttaaaccagatctggcgattattttcactggttaatattttcgccacttcagcagtggtcataatatgaccactcattaagtgtccgccaatttcatcactgaatttcgccgcacgctcaacgtttacccaatcccccacttttaaatcgccaagattggtaatgcgtaacgtttctttcatcaggtcaaaactgacatggttgccgttaatttccgtcacggtcaggcagcaaccgttatgcgccacggaagcaccggtttccaggccgtccagcatgtggtcgggtaactccaccacatgcgtacgaaaatttggtttctcgtcaatgctcaccagttttgcggtgccctgtacaatccccgtaaacatacttacaactcctgaaatcagttaagacattctgttcagcacaatagcaggtggaaaacgcccttaccagtgaaggggtaagaatggctattttttcactggagaattaataaatcctcgctacaatagactgaatttcccctgcttcttctttttgctgcccattcaggcggctttttagtctctcatataactacaaataaaaggtgttcacgtgcagaagtatatcagtgaagcgcgtctgttattagcattagcaatcccggtgattctcgcgcaaatcgcccaaactgcgatgggttttgtcgataccgtgatggcgggcggctatagtgccaccgacatggcggcggtcgctatcggtacttctatctggcttccggcgatcctctttggtcacggactgctgctggcattaacgccggttatcgcgcaattaaatggttccggtcgacgtgagcgcattgcgcatcaggtgcgacaaggtttctggctggcaggttttgtttccgttctcattatgctggtgctgtggaatgcaggttacattatccgctccatggaaaacatcgatccggctctggcggacaaagccgtgggttatctgcgtgcgttgttgtggggcgcgccgggatatctgttcttccaggttgcccgtaaccagtgtgaaggtctggcaaaaaccaagccgggtatggtaatgggctttatcggcctgctggtgaacatcccggtgaactatatctttatttatggtcatttcggtatgcctgagctcggtggcgttggttgtggcgtggctactgcggcggtgtattgggtcatgttccttgccatggtttcttacattaaacgcgcccgctccatgcgtgatattcgtaacgaaaaaggcaccgcaaaacccgatcctgcggttatgaaacgactgattcaactcggtttgccgattgcgctggcactgttctttgaagtgacactgtttgccgtcgtggctctgttagtgtctccgctcggtattgttgatgtcgcaggacaccagattgccctgaactttagtagtctaatgttcgtgcttccaatgagcctggcggcagcggtaactatccgcgtaggttatcgtctgggtcagggcagtacgctggatgcgcaaaccgctgcgcggaccgggcttatggtgggtgtctgtatggcaaccctgacggccattttcacggttagtctgcgggagcaaatcgccctgttgtacaacgacaatcccgaggttgtaacgctggctgcgcatttgatgttgctggcggcggtatatcagatttctgacagtatccaggtgattggcagtgggattttgcgtggttataaagatacgcgttccattttctatattacctttacggcttactgggtgctgggcttgccaagcggctatattctggcactgaccgatctggtcgttgaacctatggggccagcaggcttctggataggctttattattggcctgacgagcgcagccattatgatgatgttgcgtatgcggttcctgcaacgtctgccgagtgccatcattctgcaacgagcatcccgctaataaagacaaggcgcaaccttcacgggttgcgcctgtatttttacgcaggctggagcgttgcgccaatcccgtcttcgtctggctgtaatttcagagcgttacacagagtttgccgactggcatctgttatctcaacgtgtatatccccggtaacttcccctttcacattgatgaagtcaggactaatttcttttgcactggtttgcaggcaaatcgctccctctccgcgcaggcgtttcactttcagttgcacatgcgttgccgcatcagtgatcagccacagttttccaccattcagattgatgttaccaacaatgaaagtgacactgtcaccttttaccgtactgccgtctagaatcaacacaccgccctgctgtacagtaatcgtactttgttgcagctctgcgccataaccaataatcatactagcgccgtccagtaatgcaacactcccggtcagttcaaccggtgcgcgatcttcctctacgacaaaattttcgtccgcgctggtgggactcaacaggatcactgtcccaccttgtattaccgcgttttccagcgtaccggcatgcacttcagcccgaccacccacattcacggacaggttttgcgtcttaccggaactgtagagctgaaggccatccgtccccagacgataaatggatccattctcaacaatagtgtcagagtcttcaccaccgagattattcatggtgccaccagcaagcaacgtatcactggctttcccggccagcataaaaacgccgccctgattaatctcacaattgctggcttccccacctggatacaccaacaattcaccaccttcatctaccacgaccgcactggttgtcccattaaccaacaggccgccctcttgatcgagaatgattttttccgcgcgatgtccttccagtacacgcaggttaccgccattttccagcaacaaaccgcaggcataacctttatcaacgctgaattcaccttcgggatggcggccattaaccgtagcgagcgtagagagactaattgcgcctccctcggactgaacaatatctgtggcaatggcaccatcgctgacgcttagcgtgccattgttaccgtactgtgtgcatttggcgatcccaccggttgccactttcaaccagccagcccccgtgaccacggtattttcggctcttccgccagcttcaacaatcaactcgccttcagtaagttgcgtcgcgccaatgacctcgccggtcttaacaatttgcacgttcccgtcgctcatcaagtttttcgcatcagatcccatgatttattcctttgctgcatctgtgtgcctttattgctacctaagtgtaaaggctacggaggatttatccacgacagatttgagatggtggcaaacaactctgtttaaactctgatacacgaattattgggttgtatcagatgtaaatgcgatcctgaataaaaatcacccttgcaaatcaacaaaatatagccaatttgcttaaaagctctgcaaacggtcgaaatagcgcagaaaattacgttttgcctcttgccaccttcccactctgccgctaatattcgtccccgttgtcacctacaacgttgcgttcatagctcagttggttagagcaccaccttgacatggtgggggtcgttggttcgagtccaattgaacgcaccatcctgcgtccgtagctcagttggttagagcaccaccttgacatggtgggggtcggtggttcgagtccactcggacgcaccagattttcttaatctggtcttctcctttttccctctgtttcttctctgtatccaatacgttaaaagatttacactgtcttcgtatgcgttatcagaaggagaatcgctatggcaactttgttacaacttcattttgcttttaatggcccatttggcgacgcaatggctgagcagcttaaaccacttgctgagagcattaatcaggaacctggttttctgtggaaggtatggacagaaagtgaaaagaaccacgaagccggtgggatctaccttttcactgatgaaaaaagcgcccttgcctatctggaaaaacatactgcccgactgaaaaatctcggcgttgaggaagttgtcgccaaagttttcgatgtcaatgagccacttagtcaaatcaatcaggcaaaactcgcctgacagaatttaatcaagggcggttagcgcccttttcatccctgtctgaaatttctcaaattctaaaaatctcaaccaaacttatctgataacactaaattcgaaagaatgcgtacaggtaagtaacaatgaaaaaaattgctattgtgggtgccgggcctacggggatctacaccttattcagccttctacagcaacaaactccactttctatttctatcttcgagcaggctgacgaggccggtgtcgggatgccatacagtgatgaggaaaacagtaaaatgatgctggcaaatattgccagtattgaaataccgccgatttattgtacgtatctcgaatggctacaaaagcaagaagacagccatctccagcgttatggcgttaaaaaagaaaccttgcacgatcgtcagtttttaccgcgaattctgctgggcgaatatttccgcgatcaatttttacgactagtagaccaggcacgacagcaaaaatttgcagtggctgtttatgaaagttgccaggttaccgatctgcaaattacaaatgctggcgtcatgctcgctacaaatcaggatttacccagcgagacgtttgatttagcggtgatcgccacgggtcacgtctggcctgatgaagaagaagcaacccgaacgtattttcccagcccgtggagtggcctgatggaagcaaaggtcgatgcgtgtaacgtgggtattatgggaacatccttgagcggactggatgcggcaatggcagtggctattcagcatggtagcttcattgaagatgataaacaacacgtcgtttttcaccgcgataacgcaagtgaaaagctaaatatcacgttgttgagccgcacgggtattttacccgaagccgatttctattgccctattccctacgagcccttacacatcgtcaccgatcaggcattaaatgctgagattcaaaaaggcgaagagggccttttggatcgggtatttagattgatagtagaggaaatcaagtttgctgatccagactggagtcaacgcatagccttagagagcctgaatgtcgattcctttgctcaagcctggtttgccgagcgcaaacaacgcgacccatttgactgggcagaaaaaaatctccaggaagtcgaacgcaataaacgagaaaaacatactgttccctggcgttatgtcattctgcgcctgcatgaagccgtacaggaaattgttccacatctgaatgaacacgaccataaacggttcagtaaaggccttgcccgggttttcatcgataattatgcggcaatccctagtgagtctattcgtcgcctacttgccttacgtgaagcgggaatcattcatattctcgccctcggtgaagactacaaaatggaaattaatgagagccgcaccgtcctgaaaacggaagacaacagctacagctttgacgtttttattgatgcccgcggacaacgtccgcttaaagtgaaagatatccctttccctgggctacgcgagcaattacagaaaacaggggatgaaatccctgatgttggcgaagattatacgttacagcaacccgaagatattcgtgggcgcgtagcgttcggcgcgttgccctggttgatgcacgaccagcctttcgttcagggacttacggcatgtgcagaaattggtgaggcgatggctcgggcggtcgtaaagcctgcatcccgtgctcgtcggcgtcttagctttgattaaaggtaaagctatcagcactcaacaaactgatgctgttcattaagacgatagcggactccggctcgaatattgttttcaccttcaatggcgacggcgaagcgaactctttcgccgtcatgatatgccagtgcggcgcttcctcctggcccgagaataatactgtcgaccacgcccgtgctcactaccgtactattttcaccgctggcaatgatgtgtacattgtcgccgctgttggcaattctggcgtttgcgccaaagctggcgatttgcaccaggtcaccattactggcgacatgacaccgttcacccaatgtacaaacgcgtactcgcattccggtattcgcaatccgactgctatctccagcgctgcttatccggctagaattaccggttacagcaacccgtgcgcgttcaccggagctgccaatgtgactgttaaagccgacacttccaatccgcacgctataacccatactggcaatttgcgcggcatacccagcggttgcgattctggcgttatcctcacaacagccgatgcgagcatgatcgtcgctgcgggcaaactgactgcaaaatggtctctctccggggtctgtggccagtttttgcatagaggaaacttcctgatgcgcgaagttttcatccgccagccattttttccacgcatactcaaccagactctccgcccagtccgtatatccttcctcaatcagtgcatgatgaatatcggcataactaccgccgcgtgggaaatggcgcaggaaccagcgatacatcaccgctccgatacgccattctcgcaggtctgcttgtgtaatgatcattcgttagtgccggtgatagccatcgaccatgcttttaaaggtttcgtgtggcgtacgccccgtggtgcaaagataaagatgaccgaagataaaaaagaggcttataaatgccagagcaaaatgtgtctgcaataaccagtatcttacgccaggaaacacatctcccacggcttgcggatagagacacagcagccccgtcaatagtaacaacggcagcaatccatacatgacaccaacataggcgacctgctgtaagggattaaatttagactgggttgttgccgggaaaggatgttcttccccctgcataatgccaaacaaataaaatcgcgtttgttttgccgctcgttccagccacccctgacgacgaatgcgatagtggtgaccattatccccaacggcattgatcagcacaaagccgagccagcatgccagtaacaaaaatccgcaaacttcatgcaccgcaaccagacttttaaccgcagttgcgcccaccatcgcaaagtgatttatcagcccactggccagcaacaatacaaagagtaacgcattgctccagtgccataatctgaccgctttgctgtaaagataaatcttctcaccatgatcggtggcacttttcttcacgccacgagcacgaagcaaggcatgcagccccagcaccaaccacatcccaaccagcaatactccggcaatgatcaaccacaccggccaaaattcgggagtgaactgtggcacatagttcgctaactggctctgaaactgttcagcatgttggctcgggttcatacattttcctttttaatcaaatgttgaccgaaccggcgatacagatgcggtttcccggcaccaggtagctgatattgatagtatttattttgctgcaaccacgcctgaatttctgggctatcttcgcgaccaaagatcaatgcgtgttccgggcaggcgctgacgcaaatgggcggaaagccttttgccagtcgggactcagcgcagaaatcacatttatctgccactttagtgacagggttaaggtagcgaacctggtacggacaagcgccaatgcaataactgcagccgatgcactggcttttttctacccgcacgatcccctgctcatcacgccagctcgcccccgtcgggcaaacgtcgatgcacggagcatcttcgcagtgctgacaactctggcgaaaaaagtgatactgcgtttcgttgtcgttatcggtgactggaatgtgtgctatgcttaaacggcttccctgagcggggacgtggttagttttacggcatgcgcgggcgcaaatattacagccattgcaccgactctcgtcatgaatcatggcataccgaacttccttttcttgcctcgtgttcgctaacagagaagacgcagaaccagtaaaaaagattactgttcccatccccagaacaaatttgcgtcgagtgaaggacatctgattatcccctaatgcagtggctgcaactgtccaccctatccatgacatctccctgaaatttcaggggttctgaaactgctctacctcgaaccattcgcataagccataagccttgccataggtcataaatcgctcgctaaacaagtacaacaccgccgtgctactctccacctgccgtatatcggcatattcaggtgcaacatccatcgcggcgatcgcggcttcaatctgcgcttcctggaagtaatatggcgcttgcatcagcatggcgactttgtaaggacgaggatacgtctggcactcaaaacgaacggcgtgtgcaatggcgcgacaaatgtcctgctccacaacttgcaaagacatcgccgcgtagttttcactcatggcctgcgtactgtaatagtaatcatccttgcttcccgtcaaacaagcgatatccgcgtagtctccgttctgcttaatgctttccagcaaaacactcagttcctcttctgcaaccaaatagggtgggctgagaaacacggcgcgcgccaccagctgcccagccgcagaatgctggcgaatgaactcagccaggatttcagcaggttctggttcggttaccgtatcaacggggtgacgcatcccctgcaaccattgccgcttcgcctcgtcaacttcgctgactttcgctaacggcaattcatcctgatggttcatcttacccattccttacgcaggcagtagattgtgtgctgccagatcggcggcaatatcttccagccccagacgctgcaatgtttcgcgggttggacaaccaagctgtgggtcccagcccatttctttgtagaacatcgtgaggctagcatgcatatcgtcacgatccattttgtcagtaccttcagtaaagaccgggatctgcggatccttgtcgaatacccaggaacagataagatcgtgttcattacgcatatctttggtttgcatcagttttaccgtgtaggcacgatgcaacgtaaaaatacgctctgcagctaaatctaatttttcctgagtcatctcttcgccggtgatcgctttgaagaatttggcttcaagcgccagatcgccccggtaattacggcttttcagcgggctaacggtcattggccagacccagttgcacagggtgacggcgttatgcaaacagacccgcaacaggctccactttgcatatttaatttttgcgtcattgattggcgtgtagtttttggtttcatcgtaagcatcttcagaaccaaaaagttctttcgccacttcacgttgcagtttcaatggcaagccggaaccaataaagttgatatgggtatgcgtcatgcagtcacggttgaacatacagttaacaatggaaccgacctgcgcactcgcttcattggcatggtgaaccggatagccaaacgggctccagagtttatttttcgcgtagccccagtactcttcacccaaattccagcgttctgcgatggcataactaccatcagccaggtgactcagctcacccacacgatgcgccagacggtagtaaaaatctttaatgaagttaacgtcacccgcttccagttgatcccagcgaatttctgcatactcttcagctggcagaacacgcttgaacacacctttgctgtaacaataagtaaagtcgcgatgcaactgcccgtagttacaccataggccgtagtcatcgaacaaattcagacccaccaggttaccaatcacacgaccatcgtctttatcttcaaaatctttcggcccgttcgggaagatggtggtatggacaaagtttgctacacaagtgttaccacctgtgctgggcacgccaaactctttcacccgaggaatattcatttgggtcatacaacggatcgggcaagagtggcagccgctcatttttactgtgtatttctctgccgccggtcctaagtcaaaaacggatttataggtacgaaagccgaccgtattctgattgcctggcggaatttcacccgtttcaatcggaccaccttcagccgcgccccaaaacagccctttacgtgctgtccagcgactcttgggatcactatactctgcccagctttgtggcgtacttggcacgacatggttgttattcgcaccaataagttcagtcatcatgtaatcattgagacgcttcatctcctgacgatcggcaatgttgacccctttcgtcccttcaaccgcaatcgctttcaggtttttgctacccattattgcgccagttcccgcaccgccgctgtggttacggctattcaacatgccagagagaggaacaaggttttccccagcctgaccaatagccgccacacaggtttccggactggtcaatcgacaaatttcttccgtcgttgcgcgcgtcccttttccccataagaaatcggctttttccaggctaactttgtcatctttaatcttcagccataccggacttttcgccttcccttcgataataatgacgtcgtatccagcgaatttcatttgcgctgcaaaaaagccacccatatgggcatcgacgactaaatttcctttggtaaaagtagaaagactggtgatatttacgcgagaactacagggggcaccagatccagttaatgggccggtagcaaagactaatttattcgcttcatcgaaaggtttcgtgcctggcggtacttcgtcatacataattttgtagccgaagcccatgccaccgacaaaacttttaaacttactggaatcttcgagggtaatatttcctgtcgtgagattgactcttaatatattacctgtccaaccgttagccatgattttttcctttgcaagattcacacagtaatatctttccactcgataatttttaacgcccctgttgggcaggcgtttgcgcattcaccgcataacacacatttgctggattttttactttcggtatttacggtggccatcatccacgggcatgccgtagtacaggcgctacagccaatacagcgtttatgatcgacggtaatacagccttctttctgctgccaggtaatcgcaccaatcgggcagacgttcatgcattgcggctctttgcattgacggcaggtgtccgcggtatagttgagatcgccatacaggccgccgccagagccaaccccgttgtcgccaaagaaataattgcgatggattttgatacgggagaagaatgtccctacactgccatcgttgaagttggtacaagagatttcacagcggtggcaacccgtgcatcgcgctcgctgggtcaccagcacccctttgggggtatttatcaaccctactgtgccgctatcaatatcttcctgtttgcaacccaaaagactcagtaacgcaggggcaattgttagaccagcaaggccttttccacttatacgcaagaattctaatcgcgttaagccaatatctaatagtggacgatcaaccgggttcatttatttcgcatcctcttcgcaaacacagtgctgacaattcagcagcctgatattaagcattcaactaatacgctgctgactctgtccccaacaccagatattttccctaacccgatagtgtatgagaaaagattaacgccgataaactaatcctttatggttaggagaaaaaataatgtgattattctgagcccttaacattgatcgttatcaattaaaattacaaagcaagaaattataagtgaactgatatttattatcatttgaaataaatttaacttaagcgacaattatttgtgactttcattgcagaaaataaaaataacattatcgctataaattaaaatacataccgaaattcgtataatttcagcagttgttatttagaatgattaactggaccgcaactgaagcaagaatatcaggatgaagcttaccgcctcatcctgaatggtcattttaccagtgcgttaatgacggtttccatcgcctgcttttccagctcactgcgctgaatgcgtttattggctaatgctgtacgtaatacgcctgcgataacaatatgctttggttcctgccccagatcgcgcatttccagcacaactttaccgacaactctgcacatttctcggtacagttcatcctcttttgtccgatttcccattctttatacctatttatcatgccaactatcagcatatatcaatctaaccaattaaacaaaaatcaaacaaaatcagacaaataacgcgataaattattttaactgtagcaattgagcgatgatatatttatacaccggatgaactttcacttatcctcacactgacaacttcggcaccagacgttgcgcaaacagtgaagtttttgcgtaaccttttccctggaacgttaaatctttgataacaatttattgtctaacaagttgtatattttttgaaacgctgtttttgttttccttttggattaatttcagcgtataatgcgcgccaattgactcttgaatggtttcagcactttggactgtagaactcaacgactcaaaaacaggcactcacgttgggctgagacacaagcacacattcctctgcacgctttttcgatgtcacctatccttagagcgaggcaccaccactttcgtaataccggattcgctttccggcagtgcgcccagaaagcaagtttctcccatccttctcaacttaaagactaagactgtcatgaaaaagaccaaaattgtttgcaccatcggaccgaaaaccgaatctgaagagatgttagctaaaatgctggacgctggcatgaacgttatgcgtctgaacttctctcatggtgactatgcagaacacggtcagcgcattcagaatctgcgcaacgtgatgagcaaaactggtaaaaccgccgctatcctgcttgataccaaaggtccggaaatccgcaccatgaaactggaaggcggtaacgacgtttctctgaaagctggtcagacctttactttcaccactgataaatctgttatcggcaacagcgaaatggttgcggtaacgtatgaaggtttcactactgacctgtctgttggcaacaccgtactggttgacgatggtctgatcggtatggaagttaccgccattgaaggtaacaaagttatctgtaaagtgctgaacaacggtgacctgggcgaaaacaaaggtgtgaacctgcctggcgtttccattgctctgccagcactggctgaaaaagacaaacaggacctgatctttggttgcgaacaaggcgtagactttgttgctgcttcctttattcgtaagcgttctgacgttatcgaaatccgtgagcacctgaaagcgcacggcggcgaaaacatccacatcatctccaaaatcgaaaaccaggaaggcctcaacaacttcgacgaaatcctcgaagcctctgacggcatcatggttgcgcgtggcgacctgggtgtagaaatcccggtagaagaagttatcttcgcccagaagatgatgatcgaaaaatgtatccgtgcacgtaaagtcgttatcactgcgacccagatgctggattccatgatcaaaaacccacgcccgactcgcgcagaagccggtgacgttgcaaacgccatcctcgacggtactgacgcagtgatgctgtctggtgaatccgcaaaaggtaaatacccgctggaagcggtttctatcatggcgaccatctgcgaacgtaccgaccgcgtgatgaacagccgtctcgagttcaacaatgacaaccgtaaactgcgcattaccgaagcggtatgccgtggtgccgttgaaactgctgaaaaactggatgctccgctgatcgtggttgctactcagggcggtaaatctgctcgcgcagtacgtaaatacttcccggatgccaccatcctggcactgaccaccaacgaaaaaacggctcatcagttggtactgagcaaaggcgttgtgccgcagcttgttaaagagatcacttctactgatgatttctaccgtctgggtaaagaactggctctgcagagcggtctggcacacaaaggtgacgttgtagttatggtttctggtgcactggtaccgagcggcactactaacaccgcatctgttcacgtcctgtaatattgcttttgtgaattaatttgtatatcgaagcgccctgatgggcgctttttttatttaatcgataaccagaagcaataaaaaatcaaatcggatttcactatataatctcactttatctaagatgaatccgatggaagcatcctgttttctctcaatttttttatctaaaacccagcgttcgatgcttctttgagcgaacgatcaaaaataagtgccttcccatcaaaaaaatattctcaacataaaaaactttgtgtaatacttgtaacgctacatggagattaactcaatctagagggtattaataatgaaagctactaaactggtactgggcgcggtaatcctgggttctactctgctggcaggttgctccagcaacgctaaaatcgatcagctgtcttctgacgttcagactctgaacgctaaagttgaccagctgagcaacgacgtgaacgcaatgcgttccgacgttcaggctgctaaagatgacgcagctcgtgctaaccagcgtctggacaacatggctactaaataccgcaagtaatagtacctgtgaagtgaaaaatggcgcacattgtgcgccattttttttgtctgccgtttaccgttactgcgtcacgcgtaacatattcccttgctctggttcaccattctgcgcactctctacactaggcgcattgctggctgcgggagttgctccactgctcacgctaaccggataccctgcccgacgatacaacgctttatcgactaacttctgatctacagccttattgtctttaaattgcgtaaagcctgctggcagtgtgtatggcattgtctgaacgttctgctgttcttctgcgcttagtggtcgatgtacttcaacataacgcatcccgttaggctccacggaatatttcaccggttcgttgatcactttcaccggcgttcccgtccgcacgctggagaacaaggctttaatatccggtgcattcatgcgaatacacccactactgacgcgcaaaccgacgctgtccggcgcactggtaccatgaatgaggtattcgccattaccatgcgcgaggcgcagtgcgtaacgtcctagcgggttatttggtccggcaggaacgactggcggtaatttaatgccacgctccaggctacgctgacgaatgcctgccgtaggcgtccaggttgggttagggattttctgcccaacacgcgtttccatcaccggcgtttccagcccctgcaatccaatacctattggataaacctgcacaatattttctcccggcggataataataaaggcgcagctctgcaaggttaacgataatcccctgacgcggtgcatcaggtaataacagttgactaggaatagttatcgtcgtaccaggttttggcaccggggcgatagtgttattggcttcaaggatcaacattgccgcagtatcaaaacgtcgggcaatagcctgaaggtttttatccccttcttgcaccgtatacgtttgattttgcccaaccagtcggcttccggttggtggtagcggataatcaaccgcccaggcagcctggatggcgctaaaagcgccgataagcgtgagtgtaagcaaagacgcgcgtttcattgtaaacctcctgtatttgccggagactcacgctgaaacgtcggatggcgcttatgttcacctgaaaccaaaacactcctgtgcaggtcagtgtaaacattgaccatccggcaatgtgagccaaccggatgaaagctgtccttttagtttagctaagtgcagcggctttggcgcgaattgcgcgaatcatcgcttccagaccttgactacgagatggggtgagatgttgggtgagcgccattttttcaaaccacggacgcacatcgaaattgacaatatcctgcggcgtcatctgatcgtagagaataaagacgaccgcaataagccctttcacaatcgccgcatcgctgtcgccctgtaattcaataattccctgggcattctggcgcatgacaatccacacctgactctgacagccctgaatgctattttgtggacttctgtcttcgtcgcgtaattctggcagacgctggcccagctcaataatgtagagatatttctcttcccagttggcgcagcgtaaaaaattacgcagcaacttttctttatccggcaataaagccatagtgcctccctgttatcccagcaaacggtgaatacgttgcaggccggtcaccagacgatccacttcttcatgggtgttatacatggccaggctcgcccgacacatcgcagggacgttgtaataggccatcaatggcattgcgcagtgatgtccggtacgcacagcaatgccgtaattatcgagaaaactgccaacatcataggcgtggtgtttaccgagattaaaagcaataacgccaagcctgttttgtgggccatagagagtgagatccggtacagattccagctgacttagcgcataatgcatcagattctgttcatactcggctatgttattaagccccagcgcgctaacatactccagcgccgcgccaagaccaatgatgcccccggtattgggtgtaccggcttcaaaccgccatggtgctttggtccaggtagtgccttcactcaggctgacggtggcgatcatagaaccgcccccttcccacggcggcatctcctgcaacaaggcttctttcacataaagaatgccaattccggtggggccatacagtttatgcccggagaacacgtaaaagtcgcaatccagcgcctgaacatccaccggatgatgcatcaccgcctgagcgccatccaccagcacttttgcgccatgctggtgcgcaagcgtgatcatttccgccagtggattttctgtgccaagcacgttggagacatgagtaattgccagcaggcgagttttctcatcaaacagcgtaggcagcgtctccagttgcaacgtaccatcgggattgagcgggatcacacgcagctctgcgccaacgcgtgcgcaaagcatctgccagggaacaatgttagcgtggtgctccatctgactgatgatgatgttatcgcccgcccgcacgttgctgttgccccagctattggcgaccagattgatcccttccgtcgtgccgcggacgaacaccagctcttccgcgctacgggcattaataaacaggcttgcccgcttgcgcacgttctccattttctcggtcgcctgggcgcttaaggtatgaataccacgatgcaccgccgcgtagccatgacgataaaactcggcctcggcgtcaatcacctggctcggtttctgcgcactggcggcgctgtcgagataagccagcggcaaaccgtttacctcacggctaagcaccggaaagtcggcccgcactttgtcgacggaaaaaatcatcttgcacctcctggcagccgttgaccgattcgggccagcacctgctgtttaagcccctcatcacgcagtgcttccgtcagttcggcagcgaaggcgtaaatgatcatctgctgggcatcctgctgattgatcccgcggctgcgcagatagaatatctgttcatcatcaatacgccccaccgtcgcgccgtggctgcatttcacatcatctgcatagatttccagctgcggtttcgtatccacttccgccagtttgcccatcagcagattgttgttggtcatctgaccatccgttttgatggcgtgctgcgcgacgttgatcaaaccgttaaataccgcgcggcctttgtcgctgacgatagttttgtgcaactgtcggctgttacaaaaacctttattgtgttccagccaggtacgggtatcacacacctcgtttttcaccggcatcgccaggctattgatccgcagcgtgctgttttcgccattgagttgcgtactggtgttgtgtcgtaacactgcgccacccagcaggaaactgtggctaaatgcggtggcatcctcagccagcaacaaatcgttatgagcaaagtggtgactgagcgggttttcaaacgccagcttgatatgctgcaagtgggcattcgctgcgacgttgatagtgaaccgtgccccggtaaaatgacgagcatcattcaggctgacaaaatgttcgatcaccgttgcttcggcaccttccgccagatccagatgatgtcggtaatgggcagtgttcacctcttcacctgccacgccctgggtgatatgcattaacagcaatggctttgccggccgttgaccgcgcttcacggcgatatgcgtcacgctttgtgccaggctttccgtcaaatgcagaaacacttccgcctgaatagcgtcgggtaaaccctgacggtcgtcgttaatgctcacttcatatccgctgccttcagttgcatcgctcagtgcgggcacgtaacgcccatcgacaaacaccagccgcacggagtctaacgttaacgctaaggcatcacgctgctgtggggatatctctcccgcaatgctgacaaactggctattgatcagcccttccagcggcgtatatttccagttttcatgtttacgtgtcggcagtccggtacgcagcaattgttgtaaatgctgctgtgcttgcggggagcgttttgtcccttcagcttcaaacaagtgatgccactgttgcagcgcgttactgctgttcggtaagccagccataaccctgctcctccagttgtttgaccaacgtgaaatcgccggatttcacaattcgtccctgatatagcacatgaacgtaatcaggcttgatgtagtcgagaatgcgttggtagtgcgtaacaatgatgaaactgcgcttgccatcacgcaggctgttcacgccatcggcgaccacttttaatgcgtcaatatccagcccggagtcgctctcatcaagaatgcataactccggttccagcaccgccatttgcaaaatatcgttgcgctttttctcgccgccggaaaaaccaacgtttacgctacgggttaataaatcttccggcatcttcaggagagcgattttctcttccatcaaatcctgaaaatcaaagcggtcgagcgtttcctggccgcgatagctgcgcaccgcattaagtgccgtttgcaggaaaaactggttactgacacctggaatctccaccggatactggaaggccataaagatgccttcgcccgcgcgatcttccgggctcagcgcaagcaaatctttgcctttgaactcaaccgtgccgcccgtcacttcataatcttctcgcccggcaagcgttgcgcttaaggtacttttgccgctaccgtttggccccataatggcgtgaacttcgccgggatgaacgtcgaggcttaatccgcgcaggatagctttatcttccacgctgacgtgtaaatctttaatacttaacatgtttattccttatccgacgctgtgttcaagactgatggcgaggagtttttgtgcttcaacggcaaattccaacggcagctcgctgaacacgtctttgcagaaaccgttaacaatcatgctgatggcgtcttcttcgctgatcccgcgttgcaggcagtaaaacagttgatcttcaccaatacgacttgtcgttgcctcgtgttccagttgcgcactattgttacgacactcaacatacgggaaggtatgcgccccacaattagcgccaatcagcatactgtcgcactgagtgaaattgcgcgcattggttgccgtcggcatgattttcactaagccgcgataactgttctgactatgtccggcagagatccctttgctgataatggtgcttttggtgtttttaccgatgtggatcatcttggtgccggtatccgcttgctgatgaccgctggtcagcgccacactgtaaaactcaccaatggagttatcgccgcgcaaaatgcagctgggatatttccacgtaatcgcactcccggtttcactttgcgtccaactcattttgctgttttcgccttcgcacaaagcacgcttggtgacgaagttgagaataccgccggtgttgttatcgccaggaaaccagttttgtaccgtggaatatttcacctcggcgtttttatggatgatgacttccaccactgccgcgtgtaactgatagctgtcacgcaccggagcggaacagccttcaatgtagctgacgtagctgtcttcgtcggccaccagaatggtgcgctcaaactgcccggttttttctgcgttaatgcgaaaataggtggaaagttccatcgggcagcgcacgcctttaggcacataaataaacgtaccatcagaggctaccgccgcattaagcgcggcaaagaagttgtcattccccggcaccacggtgccgagatatttacgcaccagttccgggtgatcgtggatcgcctcaccaaaggaacagaaaataattccctgctccgccagtttttcgcgataagtagtggcaacgctaacactgtcgaaaatggcatccaccgccacctctttgccttcccgcacgggaacgcccaactgctcaaacgccgcctccacctctttacttaaaaaggcgttcgcgccagtttgctgcaccgcgccaggttcagacgcgcaagtgtcgtcacaattaccgcagcttggtgcactgtagtagctgtaatcctgataattcagcttgtcgtagtgcgctttcaaccagtgcggttcttccatctccagccatgcgcgataggcgtttagacgaaactccagcatccactccggctcattacgcttcgcgctaattgcgcgcaccacctcttcgtttatcccctttgccagctcatcggtggctaactgggtgaagaatccttctttataattcagcgggccgccggtccaggttttgacatcgtcagttgcttcagtattacgagacatagtaccgcttataccccaaagctttcgccacagccacattcattctgggctttagggttgtgaaatttgaatatctgattaagtccttcacgaacgaaatcgacttccgtgccatcaataaacggcatcgcttgcagcgggacaaacagcttcgcgccgtcgtgttcaaacagcagatcgtctttgtccggctcgctaacactgtcgagcacatagccaaagcccgcgcagcccgtttgcttcacgcctaagcgcacgccgaccatacccggctgctttgccaccagctcacggatgtgtatcgccgctgcgggtgtcagcgttaagccttgccaggcgaaatcttgtgggttaaaggttccactatgcatgtccatcgatttacctcacttcatcgctttcagcgtataacagcatgttagtgataatgattatcagttcaacccagcaaacgcaggggctttaccgtaaaacatgctttttgcctgcttttaataagcatagaccctgatgtgtgggttaacaggcacgctaagaattaggtatctcattgttagataatggttattatctaaggagcattaaggctgtgatgaaaaagaaaaagttgtattgaaaatgactatttaagagataggtaaaaaagtgcagcgttcagaaataagaaaacccttaagtctgtgcgacacaggcttaagggtttctaccccatccggcgcttatctccggcactctcagtggcttagctcttgaaggggcgataagaataatctcataaagctaacccgccgttttaacacaaactgcgattagtattatttttgaacaatatcaggcggtagataagcagtattaagaaggtcatcgaacctggacggaggttaatccaggtcgatttggcgaacttgcggcattaagtcaggatcaatgcacgcccagacgccaggcaaagtagatttcttcttttaattcagcagaagagagagtaagcaggtcagcaaattcaagttctagttgtttcagacgtttgagatattgggcaggactaagattgctctggtcacggcgtaaaaattcaatggccagctgggtgggatcaagttgagtagacatagcatcctcgcttttagacaagacctgcacagtataccaccgtttactgtgcagataatgaccaaaagcaatatgcgtcacacttttctggtgacaacgtcacaaaatggcggtcgtcaatcgactgctacagcacaaacgccctttctcatcgaagatttcaatctgccagacctggtgacggctaccgagatgcaacggtttgcatacgccgcgcacccgcccttctcgtgcgctgcggacgtggttagcattgatttccagaccaaccactttttgctcaccttcggtacataaataaccggcaacggaaccgatactttcggccagtaccacggatgctcctccatgcagcaacccgaaaggctgctttgtccggctgtctactggcattgtcgcttcaagggtgtcatcaccaatatgttcaaagcgaatatccaggaaccccaccatgtttccttcacccatagcattcagtgcttccagggtgattttccgtttccatatcatttaataatctccagtaaagcctgcacaggatggcgtacccccgtgccttcaacccgttttacctggctacggcaggaatatccggtcgccagacagcggttacgcggcagtcgctgcatagcctgatgccaggataactcatagatcccgaggctattttcatggtttttcgcttcatgtccgtaagtccctgccatgccgcagcaacccacgctgacattttccagtttcgcgccaaaacgggcaaatatcgcggcccattgtgctggcgcacccggcaaggcggtaacttcggtacagtgaccaaagaaataccaactttcaccgctgactgtagccactggctgactctcaagtgcgcttgccagccattcattcgccagtaagacgttaaactcgccacgctcctcgcccagcgccagtttatattcatcgcgataacaaagtaccagcgccggatcgacgcccaccattggcatacccagcttcgccatacggttgaggaaatccgccgtctttttcgccgtcttcgcaaaacgattaagaaaacctttaatatgctgggctttgccatttgggctaaatggcagtaacacaggctggaaacctaatttttcgaccagacggacaaaatccgccaccacttgcgcatcgtaatagctggtaaaggggtcctgcaccaccaacactgtgcgcgctttctgctctgcattgagagattcaagctgttccagcgtcatgtttgcgctgcgatgccccaccatttgttgttgtaggctggggacgctcagcagcggcaaatcaaccatgccgatatgtttttcgctgagtttgcgcaccagcggctggttaatgaagaagttaaaggttttcggcgcgcgtgccatcagcggcgcgtagctctcgaccgtagcgacgaggtggtcgcgcagcgggcgtaaataacgggtgtgatagagctgcagaaaacgagagcgaaactccggcacatcaattttgatggggcactgggtgctacacgctttacaggccagacagccgctcatcgcctctttgacttcgtgactgaagtcatattcgcctttattcgcatgccagctattgcgcgtgcgggcaattaacgtccgcaaactgacgccggattcaggcagttcttgttccagtttgagtggatcaacgccgcgatccgccaacaaacgcagccattcacgcaccagcgttgcgcgccctttcggactatgaatccggttctgggtgatcttcatgctcggacacatcggactacgggcatcaaagttgaagcataaaccgttgccgttacactccatcgcaccgcgccactgctggcgtaccgcaatggggatctgccgatcgaatgtaccgcgcttcaccgcgtccactttcatcatcggcgcatcgagaccttctggcgggcaaatcttccctgggttgagtcggttatgcgggtcaaatgccgctttcactttgcgcagttctgcaaaaagttcctcaccgaaaaacgccgggctgtattcagcgcgaaaacctttgccgtgctcgccccacaacaaaccaccgtatttcgcagtcagcgccaccacgtcatcagagatttgcttcatcaaaatctcttgttgaggatcgcacatatccagcgctggacggacgtgcaagacacctgcgtcgacgtgaccgaacataccgtagcttaagccgtggctgtcgagcagcgcgcgaaattcagcaatataatccgccaggtgttccggcggtacgcaggtatcctcagcaaacggaattggcttagcggcacctttggcattgccaagcagaccaacggcttttttgcgcattgcatagatacgttcaacccccgccagctcacggcacacctgccagccgatgacacctgcttgatgactggcgatcagctcatccaaccgcgcacagagtgcatttacccgctcatcaatcagcgcctcatcatcaccagcaaattccacaatgttcagcccgagcatctcttggtcaggcacatcggtaatcaactcgctgacggaatgccagacaatatcttcccgcgccagattcagcactttactgtccaccgtctctacgctaagcgcccgcgcctcaaccataaacggcgcgttacgcagcgcagagtcaaaagagtcatatttgacgttcaccagacggcgcactttaggcaagcgtgtaatatccagccgcgcttcggtaataaaggccagcgtcccttcactacccgtcagaatgcgcgtcaggtcgaactcggtcatctcatcgttaaagacatgacgcagatcgtaaccggtaagaaagcggttaagtttggggaagttgtcgataattaactggcgttgctgacggcaacgttgataaaccgtgttataaattcgcccgattgtggtattggatttacccagcgtttccgccaattcgacgggtaaaggttgcgtatcgagaatatcgccccccaacaacaccgcgcgtacgccaagtacgtgatcactcgttttgccatagaccaggcttccctgaccggatgcatcggtattgatcatcccaccgagcgttgcccggttgctggtgctaagttccggcgcaaaaaagtagccgaacggtttcaggtactgattgagttgatcttttatcaccccggcctcaacgcgcacccagccctcttcagggttaatttcgatgatgcggttcatatggcgggacatatcaacaataatcccctggttgagcgcctgaccgttagtgccggtgccgccgccgcggggggtaaagatcaggctactatagcgttcctgcgcggcaagacgggcgatcagcgccacatctgcggtactacgcggaaataccaccgcatcggggagaagttggtaaatactgttgtcggtgctcattgtcagacgatcggcataacttgtcgccgtatcgccggtaaaaccttgttgctccagctcttgcaaaaaattaagcaccagttgaacgacgccgggtgcctgggaaatctgtggaatcattatattgaccctttcctgcggtctgtgatgtaggtcgatacactattctttcaggctgctgcaatagcgcactgaaaggtgatgtttgtttactctatggatttcgtgttgcaggaaggcggcaagcgagtgaactccaggagcttacaatagtaagtgactggggtgaacgaacgtagccgcagcacatgcaacttgaaatacgacgagtaaatcgtttgcgtgttgcctgagttgttgtaccacatttttttctaacacgcccatcagaattaagggcagaatcggcctgttaaaaaccgctgaaattgctcatcattatgcaggtgagtttcgcgtgttcacgtcgcgtcgacgatttgacgcacaaaaaaggtgaaaagtagttatggtaaatgttcgtcagcccagggatgtcgcacaaattctgcttagcgtgctgtttttagccatcatgattgtggcatgtctgtggattgttcaaccctttattctcggctttgcatgggccggtacggtggttatcgccacctggccggtattgttacgtttgcaaaagatcatgtttggccgccgctctctcgccgttctggtgatgacgctgttattagtgatggtgtttatcatccctattgctttgctggttaacagtatcgtcgacggcagcggcccgctaattaaagccatttccagcggtgacatgacgttacccgatctggcgtggcttaataccattccggtgattggcgcgaagctgtatgcaggctggcacaacttgctggatatgggggggacggcgatcatggcgaaagtccgcccttatattggcaccaccaccacctggttcgttgggcaggcggcgcatatcgggcgctttatggtgcattgtgcgctgatgcttctcttcagtgccctgctgtactggcgcggtgaacaggtggcacaaggcattcgccattttgcaacccgtctggcaggcgttcgcggagatgccgccgtgctgctggcggcacaggctatccgcgcggtggcgctgggtgtggtggtgacggcgttagtacaggcagtgcttggcggtatcggcctcgccgtatccggcgtaccttatgcaacgttgctaacggtgttaatgatcctctcctgccttgtccagcttggcccgttgccggtactgattccggcgattatctggctctactggactggcgataccacctggggaacggtattgttagtgtggagcggtgtggttggcacgctggataacgtcatccgcccaatgttaattcgcatgggtgccgatttaccgctgatcctgattctctctggcgttattggtggtttgattgctttcgggatgatcggtctgtttattggtccggttctgttagccgtttcctggcgtctgtttgccgcgtgggtggaagaagtcccgccgccgacggaccaaccggaagaaattctcgaagaacttggcgaaatcgagaaaccgaataagtaatttctcatcaggcggctctgccgcctgattgttaaccaccgctaattgatatttgcttgctcttccccatattttcctgcttaccgccattcagctggtagtacctgtcgcaaattctttacagtttttaaactaatgagacgaatctgatcgacgcaaaaagtccgtatgcctactattagctcacggttataaatcaacatattgatttataagcatggaaatcccctgagtgaaacaacgaattgctgtgtgtagtctttgcccatctcccacgatgggcttttttttaacatttttccgcttcgctacctcgcccctcactctttccaataatgttgcacaagatactgtgactctcttcaagccgtcagcaggctgataatgttatttatattttattgtttatttcatgcagccattacacgatgaacgcttatgaactccaggcactccgccatatttttgccatgactattgatgaatgcgcgacctggattgcccagaccggtgacagtgaaagctggcgtcagtgggaaaatggcaagtgtgccattcctgatcgtgtagtcgagcaactgttggctatgcgtcagcaaagaaaaaaacatcttcatgccatcatagagaaaataaataaccgcatcggcaacaacaccatgcgttttttccccgacttaaccgcatttcaacgagtctaccctgatggcaattttattgactggaagatctatcaaagcgtagctgctgaattatatgcacacgatctggagcggctttgttaatttttccacagaaaggaattgtcgttgttacaacaataatgaacggatgctgacacaacatcgcttcactttttaaagcacctttgctaagtagaacctatgaaaaatccctatttccctaccgcacttgggttgtattttaattacctggtgcatggtatgggcgtccttttgatgagcctgaatatggccagcctggagacactttggcagactaatgccgcgggtgtcagcatagttatcagtagcctgggcattggtcgattaagtgtcttgctttttgcaggattattatccgatcgctttggtcgccgcccttttatcatgctcgggatgtgctgctatatggccttcttttttggcatcctgcagaccaataacatcattatcgcttatgtttttggctttctggcgggaatggcaaacagttttctcgatgcaggcacttatcccagtttgatggaagcttttccacgcagtcctgggacagccaatattttaattaaagcatttgtttccagcggacaatttttattaccgctaatcattagcctgttagtgtgggctgaactgtggttcggttggtcctttatgattgctgcaggcattatgtttattaacgctctgtttttataccgttgtacgttcccaccccatccgggtcgtcgcttacctgtcataaagaaaaccaccagctctacggaacatcgctgtagtattatcgatttagccagttataccttatatggctatatcagtatggcaacgttttatctggttagccagtggctggcacagtacggacaatttgttgcaggcatgagttacactatgagcatcaaactactcagtatctacaccgtgggtagcctgctttgtgtatttattaccgctccactcattcgtaataccgttcgcccaacaacattactgatgctgtacacctttatcagttttattgctctgtttaccgtctgcctgcatcccacattttatgtggtgataatatttgcttttgtcattggttttacctctgctggaggtgttgtgcaaattggcctgacgttaatggctgaacgtttcccttacgctaaaggtaaagctacagggatctattacagtgcgggcagtattgcgacctttactattccgttgattacggctcatctgtcccaaagaagtattgccgatattatgtggttcgataccgccatcgctgccatcggttttttactggcactgtttatcggcttacgcagccgcaaaaaaacgcggcatcacagcctaaaggaaaatgtcgctccgggtgggtaatgcaatattcttttcaggtcatgcaagatcttacggataaataactctttctgcgctaactaaggaaaatcgcgatcaaaaacaaactatgacatgcaatattcctggaaacataaactttatgccatgtacccagggaaaatcatcttcagtatagtaattatgtaaaccgtcggagaacaatacgtacggtaacgaaattatctttcagcaaggagctgtgaaaatgtctcaaaataaggctttcagcacgccatttatcctggctgttctttgtatttacttcagctacttcctgcacggcattagtgttattacgcttgcccaaaatatgagttctctggcggaaaagttttccactgacaacgcgggcattgcctacttaatttccggtatcggtttggggcgattgatcagtattttattcttcggtgtgatctccgataagtttggtcgtcgggcggtgatattaatggcagtaataatgtatctgctattcttctttggtattcccgcttgcccgaatttaactctcgcctacggtctggcagtgtgcgtaggtatcgctaacagtgcgctggatacgggtggctaccccgcgctcatggaatgctttccgaaagcctctggtagcgcggtcatactggttaaagcgatggtgagttttgggcaaatgttctacccaatgctggtgagctatatgttgctcaataatatctggtacggctatgggctgattattccgggtattctatttgtactgatcacgctgatgctgttgaaaagcaaattccccagccagttggtgggcgccagcgtaactaatgaattaccgcaaatgaacagcaaaccgttagtctggctggaaggtgttagtagcgtactgttcggtgtagccgcattcagcaccttttatgtgattgtggtgtggatgcccaaatatgcgatggcttttgctggtatgagtgaagctgaggcattaaaaaccatctcttattacagtatgggcagcttggtctgtgtctttatttttgccgcactactgaaaaaaatggtccggcccatctgggctaatgtatttaactctgcactggcaacaataacagcagccattatctacctgtacccttctccactggtgtgcaatgccggagcctttgttatcggtttcagtgcagctggcggcattttacagctcggcgttagcgtcatgagtgagttttttcccaaaagcaaagccaaagtcaccagtatttatatgatgatgggtggactggctaactttgttattccactgattaccggttatctgagcaacatcggcctgcaatatatcattgttctcgattttactttcgcgctgctggccctgattaccgcaattattgtttttatccgctattaccgcgttttcattattcctgaaaatgatgtgcggtttggcgagcgtaaattttgcacccggttaaacacaattaagcatagaggttaaaggagttaattatggatgttaccgcaaaatacgaattgattgggttgatggcctatcctatccgccacagtttaagccccgaaatgcagaataaagccttagaaaaagcgggattgccatttacctatatggccttcgaagtggataacgatagctttcctggagcaattgaaggattaaaagccctcaaaatgcgcggaactggtgtaagcatgccgaacaaacaactggcgtgtgaatatgttgatgaattaacaccagctgccaaactggtgggggccatcaacaccatcgttaatgatgatggctatctgcgtggctataacaccgacggcacgggccatattcgcgccattaaagagagcggttttgatatcaaaggcaaaacgatggtgctgttaggggccggtggtgccagtacggcaattggcgcgcagggggcaattgaaggtttaaaagaaattaaactctttaaccgtcgggatgagttcttcgataaagccctcgccttcgcgcagcgggttaatgaaaacaccgattgtgtcgtcacggtcaccgatctcgccgatcagcaagcctttgctgaagccctggcttccgccgacattttaaccaatggcacaaaagtgggtatgaaaccccttgagaatgaaagtttggttaatgatatcagtctgttacatccgggacttctggtcactgaatgcgtgtataacccgcatatgacgaagttattgcagcaggcgcaacaagctggttgcaaaacgattgatggatacggcatgttgttgtggcaaggggctgaacagttcacattatggactggcaaagatttccctctggaatatgttaaacaggtcatggggttcggtgcctgacaggctgaccgcgtgcagaaagggtaaaaaatgaaaaccgtaactgtaaaagatctcgtcattggtacgggcgcacctaaaatcatcgtcagcctgatggcgaaagatatcgccagcgtgaaatccgaagctctcgcctatcgtgaagcggactttgatattctggaatggcgtgtggaccactatgccgacctctccaatgtggagtctgtcatggcggcagcaaaaattctccgtgagaccatgccagaaaaaccgctgctgtttaccttccgcagtgccaaagaaggcggcgagcaggcgatttccaccgaggcttatattgcactcaatcgtgcagccatcgacagcggcctggttgatatgatcgatctggagttatttaccggtgatgatcaggttaaagaaaccgtcgcctacgcccacgcgcatgatgtgaaagtagtcatgtccaaccatgacttccataaaacgccggaagccgaagaaatcattgcccgtctgcgcaaaatgcaatccttcgacgccgatattcctaagattgcgctgatgccgcaaagtaccagcgatgtgctgacgttgcttgccgcgaccctggagatgcaggagcagtatgccgatcgtccaattatcacgatgagcatggcaaaaactggcgtaatttctcgtctggctggtgaagtatttggcagcgcggcaacttttggtgcggtaaaaaaagcgtctgcgccagggcaaatcagcgtaaatgatttgcgcacggtattaactattttacaccaggcataagcaataatatttcggcgggaacaccctccccgccgaactaaaaaatatattcaatcgtatttaataaaaatatttcgtgagtctctgtgcgctaattctccatttggcgtagggaaaatcacatctgaatcaggaattaacaatgaaacctgtaaaaccacctcgtattaatggacgagtgccggtcctgagcgcacaggaagcggtgaattatattcccgacgaagcaacactttgtgtgttaggcgctggcggcggtattctggaagccaccacgttaattactgctcttgctgataaatataaacagactcaaacaccacgtaatttaagcattattagtccaacagggcttggcgatcgcgccgaccgtggtattagtcctctggcgcaagaaggtctggtgaaatgggcattatgtggtcactggggacaaagcccgcgtatttctgaactcgcagaacaaaataaaattattgcttataactacccacaaggtgtacttacacaaaccttacgcgccgccgcagcccaccagcctggtattattagtgatattggcatcgggacatttgtcgatccacgccagcaaggcggcaaactgaatgaagtcactaaagaagacctgattaaactggtcgagtttgataacaaagaatatctctattacaaagcgattgcgccagatattgccttcattcgcgctaccacctgcgacagtgaaggctacgccacttttgaagatgaggtgatgtatctcgacgcattggttattgcccaggcggtgcacaataacggcggtattgtgatgatgcaggtgcagaaaatggttaagaaagccacgctgcatcctaaatctgtccgtattccgggttatctggtggatattgtggtggtcgatccggatcaaacccaactgtatggcggtgcaccggttaaccgctttatttctggtgacttcacccttgatgacagtaccaaacttagcctgcccctaaaccaacgtaaattagttgcgcggcgcgcattattcgaaatgcgtaaaggcgcggtggggaatgtcggcgtcggtattgctgacggcattggcctggtcgcccgagaagaaggttgtgctgatgactttattctgacggtagaaacaggtccgattggcggaattactagtcaggggatcgcctttggcgcgaacgtgaatacccgtgccattctggatatgacgtcccagtttgatttttatcacggtggcggtctggatgtttgttatttgagttttgctgaagtcgaccagcacggtaacgtcggcgtgcataaattcaatggtaaaatcatgggcaccggtggatttattgatatcagtgccactagcaagaaaatcattttctgcggcacattaactgcgggcagtttaaaaacagaaattaccgacggcaaattaaatatcgtccaggaaggacgggtgaagaaatttattcgggaactaccggaaattactttcagcggaaaaatcgctctcgagcgagggctggatgttcgttatatcactgagcgcgcagtattcacgctgaaagaagacggcctgcatttaatcgaaatcgcccctggcgtcgatttacaaaaagatattctcgacaaaatggatttcaccccagtgattagcccagaactcaaactgatggacgaaagattatttatcgatgcggcgatgggctttgtcctgcctgaagcggctcattaacaggagtataatgatggatttttctttaactgaagaacaagaactgctgctggccagtattcgcgaactgattacgactaactttccggaagagtatttccgcacctgcgatcaaaacgggacatatccgcgtgagtttatgcgggcgctggcggataacggtatttccatgcttggcgtgccggaagaatttggtggtatccctgcggattacgtcacccaaatgctggcgctgatggaagtgagtaaatgcggtgctccggcatttttaattaccaacggtcaatgtattcacagtatgcgccgtttcggttctgcagagcagctacgtaaaacggcagagagcaccctggaaacgggtgatcccgcctatgccctggcgttgacggaaccaggtgctggcagtgataacaacagtgccactaccacttacacgcgtaaaaacggcaaggtctacatcaacggacaaaaaacctttattaccggtgcgaaagagtacccgtatatgctggtgctggcgcgcgatccgcaaccgaaagatcccaaaaaagccttcaccctgtggtgggtcgactccagtaagcccggcattaagattaacccgctgcataaaatcggctggcatatgctcagcacctgcgaagtctatctcgacaacgtggaggttgaagagagcgacatggtgggcgaagaaggaatgggtttcctcaatgtgatgtacaactttgagatggagcgcctgatcaacgccgcgcgcagcaccggctttgccgaatgcgcctttgaagatgccgcccgctatgccaaccaacgtatcgcttttggtaagcccattggtcataaccagatgatccaggaaaaactggcgctgatggcgattaagatcgacaacatgcgcaacatggtgctgaaagtggcatggcaagccgatcagcatcagagtctgcgcaccagcgcggcgctggcaaaactgtactgtgcacgtaccgcaatggaagtcattgatgatgcgattcaaatcatgggcggtctgggctataccgatgaggcgcgcgtctcccgcttctggcgtgatgtccgttgtgaacgtatcggcggcggtacagacgaaattatgatttacgtagcaggtcggcagatcctgaaagactatcagaacaaataatctgcaggcggcgcagcttcttaacaaactgcgccgccagatttatccaacaagacttaccggttgaggaaattcagataggatttcttgttccgcaaaacagtttttaaattgtctacggtaatcgctggggctacaaccgacatggcgcaaaaacagtttggcaaagtgatcgacattttcataacccacacgccaggagatctctgcctgacttaattcagtattagtgagactccattttgcttccgtcatacgccgttgaataacatagttaataggggaaatacgatactctttggtaaattcatggcaaatataactgacgctggcacgaaattttttgcttaactgttctaaagtgattttttcgcgataattattattcagatagaaaagaatatcttttatcagaacatcttttttaatatacccctgctcgctacgataagcatttttaaaattttcgtagtaaagaatggctaacgtataggcaaatgcatcccataagctagatgtttggctatttttactttgcggcaaaatcacacttagctcattaaataaggtttttatgacttcttttccctgccccgcggcaattaccggacaagaatgcggttgcagtagctgattttcctcagccccctgaaactgaaagccgtacagcgcacaggtacacgtcgttgccggatcgttaacgtcagaggccaccgcatgcagcctgccgcgttctatcaccacaatgtcatccgcatgtgcgacatataagctagaatcgatggtaaaccttgcaacccctttcttgacgtaaatcaactcggtttcattgtcatgaacgtgatgtccggactcccattttggatcatcgctaaatgcaaaacgactaagccgtggcgttttaccggcgacaaacagcgtttcactggcgttatcaaaacagcgttgatacatgacaacctccctattccatgagcaagcaaaaacaatatatgccggataaaatacggcgtgtattgcggttatacaaccgcgtttagcgagagctaaacaagattatttacactgaatgcaagattgtacggtcatggaataactatattgccgcaaattgcacttttgttttagcgatcgcattttttttgcaagattgttggcaaggaaaacagcttgctccgtcgaaaaccccgcaccgctatcgcacactattttcaggccatttttaccttccatcggagatggttccgtatgcgactcacaggagaaatcatgaaaataataacctgctttaagctggtgcctgaagaacaggacattgttgtcactccagaatacaccctgaatttcgacaatgccgacgccaaaatcagccagttcgatctcaatgccattgaagctgcaagccagctcgcaacagatgacgatgagatagccgcgctgaccgttggcggcagtttgttgcagaacagcaaagtgcgcaaagacgtgctatcccgcgggccgcacagcctgtatttggtgcaggatgcgcaacttgaacatgcactgcctctcgataccgcaaaagcgctggcggcagcaattgaaaagatcggcttcgatttactgatctttggtgaaggttccggcgacctttatgcccagcaggttggcttgctggtcggagaaattctgcaacttccggtgattaatgcagtgagtgctattcagcgtcagggcaatacactggtgattgaacgcacgcttgaagatgatgttgaagttattgaactctctgttccagccgtgctctgcgtcacctccgatattaacgtgccacgcattcctagcatgaaagccattctcggcgcgggtaaaaaaccggtaaatcagtggcaggcaagtgatattgactggagccagagcgcgccacttgctgaactggtcggcattcgcgtaccgccgcaaacagaacgtaagcacatcattatcgataacgatagcccggaggccattgccgagctggcggaacatctgaagaaagccctgaactgaagcctacggagaagaaacgatgagtcaattaaacagcgtctgggtctttagcgataatcctgaacgttatgctgaactgtttggcggcgctcagcaatggggccaacaggtgtatgccattgtacaaaataccgaccaggcgcaggcagttatgccttatggtccaaaatgtctttatgttcttgcgcaaaacgacgcgctgcaacgcactgaaaattacgccgaaagcattgctgccctgctgaaagataaacaccccgctatgttgctgttggccgcgacgaaacgtggtaaagcgctggcagcacggttaagtgtgcaactgaatgcggcgctggtgaacgatgccacggcggtggatattgtcgatggtcacatttgcgccgaacaccggatgtatggcgggttagcgttcgctcaggaaaagatcaacagcccgctggcgatcattacccttgcacccggtgttcaggaaccgtgcaccagtgatacctctcatcagtgcccgacagaaacggtaccttatgttgctccgcgtcatgaaattctctgtcgcgaacgccgtgcgaaagccgcaagcagcgtggacctgagcaaagcaaaacgtgtggttggcgtcggtcgtggactggcggcgcaggatgacctaaaaatggtccacgaactggcggcggtgctgaatgctgaagtcggctgtagtcgtccaattgccgaaggcgagaactggatggagcgtgaacgttatatcggtgtctccggcgtgttgctgaaatccgatctctacctgacgctggggatctccgggcagatccagcatatggttggcggcaacggcgcaaaagtgattgtcgccatcaataaagataaaaatgcgccaatcttcaactatgccgactacggtctggtgggcgatatctacaaagtcgtccctgccctgattagccagttgagccgctaattcccctttcaaccacatctcccgctgtaaacgcagcgggaagggagcataacgcatgagcgatgacaaatttgatgccattgtggtcggtgcgggcgttgctggtagcgttgccgcactggtcatggcacgagccgggctggatgtcctggtgatagaacgcggcgacagtgccggatgtaaaaacatgaccggcgggcgtctttatgcccacacacttgaagcaatcattccaggctttgcagtaagtgcgccggtagaacgcaaggtcacacgcgagaaaatctccttcttaaccgaagaaagcgccgttaccctcgattttcaccgcgagcagccagatgttccgcaacacgcatcttataccgtattgcgtaatcgtctggacccgtggttgatggaacaagccgagcaggcgggcgcgcagtttatcccaggcgttcgcgtcgacgcgctggttcgtgaaggaaacaaggtcactggcgtgcaggctggggatgatattctcgaagcgaatgtggtgattctggctgatggcgttaacagcatgcttggccgcagcctgggaatggttcccgcttccgatccgcatcattacgctgttggtgttaaagaggttattggcctcacaccagaacagatcaacgatcgctttaatattacgggcgaggaaggtgccgcctggctgtttgccggttccccttctgacggcctgatgggcgggggatttctctataccaacaaggattccatatccttggggctggtttgtggattgggtgatatcgcccatgcgcaaaaaagcgtgccgcaaatgctggaagattttaaacaacaccccgccattcgcccgctgattagcggcggcaaactgcttgaatattccgcgcatatggtgccggaaggcggtctggcaatggtgccgcaactggttaacgagggcgtgatgatcgttggtgacgccgcaggcttctgcctgaatttgggttttacggtccgcggcatggatttagccattgcaagcgctcaggctgccgccacaacggtgatcgccgccaaagaacgcgcggatttctccgccagcagtctggcgcaatacaaacgtgagctggaacaaagctgcgtcatgcgtgatatgcagcattttcgcaagatcccggcgctgatggaaaacccgcgcctgtttagccaatacccacgaatggtagccgacatcatgaacgagatgttcaccatcgacggcaaaccaaaccagccggtacgaaaaatgatcatgggacatgcgaagaaaattgggctgatcaacttgctgaaagatggcattaagggagcaaccgcgctatgagccagaacgctacggttaacgtcgacatcaaattaggcgtcaataaattccatgttgatgagggccacccgcatatcattctggcggaaaatcccgatatcaatgaattccataaattaatgaaagcctgccctgccggactttataagcaggatgacgcaggaaacattcattttgattccgccggttgtctggagtgcggcacctgtcgggtgctgtgcggtaacactattctcgaacagtggcaatatcccgcaggcaccttcggtattgattttcgctacggctaatcatgcatcccacaggcccgcatctcgggcctgatgttctgtttcgagagtccaacatgaaagtgacattaacgtttaacgaacaacgtcgtgcggcgtatcgtcagcaagggttatggggcgatgctagcctggccgattactggcagcagaccgctcgtgcgatgccagacaaaattgccgtggtcgataatcatggtgcaagctacacctatagcgcgctcgatcacgccgcgagctgtctggcaaactggatgttagcgaagggtattgaaagtggcgatcgcatcgcatttcaactgcctggctggtgtgaatttaccgttatctatcttgcctgcctgaaaatcggtgcagtttccgtgccgctgttgccttcctggcgggaagcagaactggtgtgggtgctcaataagtgtcaggcaaaaatgttctttgcaccgacgttgtttaaacaaacgcgtccggtagatttaatcctgccgctgcaaaatcagcttccacaactacaacaaattgtcggcgtggacaaactggctcccgccacctcttccctcagtttaagtcagattatcgccgacaataccagtctgaccacggcgataacgacccacggcgatgaattagctgcggtgctgtttacctccggaaccgagggtctgccaaagggcgtgatgctaacgcataacaatattctcgccagtgagcgggcttattgcgcgcgactgaatctgacctggcaggatgtctttatgatgcctgcgccacttggtcacgcaacgggctttctgcatggcgtaacggcaccattcttaattggcgctcgcagcgtgttgttagatattttcactcctgatgcgtgtctcgcgctgcttgagcagcagcgttgcacctgtatgctcggcgcaacgccgtttgtctatgatcttttgaatgtactagagaaacaacccgcggaccttagtgcgctgcgtttctttctttgcggcggaaccacaatccccaaaaaagtggcgcgtgaatgccagcagcgcggcattaaattattaagtgtttatggttccacagaaagtagcccgcatgcggtggtgaatctcgatgatcctttgagccgctttatgcacaccgatggttacgctgccgcaggtgtagagattaaagtggtcgatgacgcacgcaagaccttaccgccaggttgcgaaggtgaagaagccagccgtggccccaatgtgtttatggggtattttgatgaacctgaattaaccgcccgtgccctggatgaagaaggctggtattacagcggcgatctctgccgtatggatgaggctggctatataaaaattaccggacgcaaaaaagatattattgtccgcggcggcgaaaatattagcagccgtgaagtggaagatattttattgcagcatcctaaaattcacgatgcctgtgtggttgcaatgtccgatgaacgtttaggtgaacgaagttgcgcttatgtcgtgctgaaagcgccgcatcatagtttaagcctggaagaggtagtggctttttttagccgtaaacgggtcgcaaaatataaatatcctgaacatatcgtggtaatcgaaaaactaccgcgaactaccagtggtaaaatacaaaagtttttgttaagaaaagatattatgcggcgtttaacgcaggatgtctgtgaagagattgaataagtttcatcttcggggatcacataaccccggcgactaaacgccgccggggatttattttatttcttcagttcagccaggcttaaccaggtttgcaccacggtgtccgggttcagagacaggctatcgatcccctcttccatcaaccatgcggcaaagtcttcgtggtcggacggaccctgaccgcaaatcccgacatatttgccctgtttcttcgcggcacggatagccatgctcagcagtgctttcaccgcatcgttgcgctcatcgaacaattcagacaccacgccggagtcacggtccagaccgagcgccagctgcgtcatatcgttactgccaatactgaagccgtcgaaatattcgaggaactgctcggccagcaaggcgttggacgggatttcacacatcatgatgattttcagcccgttctcgccacgtttcagcccctgacgcgccagttcttcaaccaccgctttcgcctgatctacggtacgcacgaacgggatcatgatctcaacgttggtcagtcccatgtcgttgcgcacacgtttcactgcttcacactccagcgcgaaacagtcgcggaagctgtcggaaacatagcggcccgcgccacggaagccgagcatcgggttctcttcatctggctcgtaacgctcaccaccgaccaggttggcatattcgttgcttttaaaatcagagagacggacaatgacgcgcttcggataaaacgcggcacccagcgtcgcgatcccttcagtcagacgaccaacgtaaaattcacgcggagaatcaaaacctttcatcatctcgcggatttcgttttgcaactgcggttcctgatcgtcaaactcaagcagtgcgcgtgggtggacgccaatcatacggttgatgataaattccagacgcgcaaggcccacgccttcgttcggtaggcaggcgaagtcgaaagcacggtccgggttaccgacgttcatcatcactttcaacggcagatccggcatcgtttctacgctggagcttttcacgctaaattccagcaactccgcatagacgtaaccggtatcaccttcggcacaagaaacagtgacgttctcaccgtctttcatccgttctgttgcatctccacagcccactaccgccggaatgcccagttcacgagcgatgatcgccgcgtgacaggtacgaccgccacggttggtgacgatggcagatgctttcttcatgatcggttcccagtccgggtcggtcatgtcagtaaccagcacgtcgccaggttcgatgcggttcatttcgctgatgtcatggatgactttcaccggacccgcaccgatgcgatgaccgatagcacggccttcggcgataatcttaccctgactatgcagcgtataacgctccatgacctgaccgcgactgcgcacggtttccggacgcgcctgcacaatgaacagtttaccggtgtggccatctttcgcccactcaatatccatcgggcgaccgtagtgtttctcaatttgtacggcctgttttgccagttcctgcacttcttcgttggtcaggctgaagatgtcacgctgttcctgcggtacgtcttcgattttaacctgcttgccgtgctcctgggtcggcgcgtaaaccatgcggatttttttgctccccatggtgcggcgcacgatagccgggcgattcgccgccagtgtcggtttatgcacgtaaaactcatccgggttaaccgcaccctgcacgaccatctcaccaaggccccatgcggaagtgataaacaccacctggtcaaagccggattcggtatcaatggagaacatcacgccagaacttgcgaggtcagagcgcaccatccgttgaacaccggcggagagcgccacaccacggtgatcgtaaccctggtgcacacgataagagatggcgcgatcgttaaacagagaagcaaatacatgtttcactgccacgagaacggcgtcaaaaccctgaacgttgaggaaggtttcctgctgaccggcaaaagaagcgtccggcatatcttctgcggtggcggaggagcgcaccgcaaaagaggcgttttcgtcatcggcggaaagctgtgcataggcttcgcggatggcgttttccagctcaggctggaagggagtgtcgataatccactggcggatttgcgcgcccgctttcgcaagctgagtaacatcgtcaatatccgttttatccagcagttcataaatgcgctggtttacgccgctttggtccagaaactggttaaacgcgtcggcggttgtggcgaaaccattcggaacggaaacacccattccggaaagattagtaatcatttcacccagggaggcatttttgcccccaaccctgtctacatcattcatgccgagttggttataccaaagcaccagcggactgctgccattgttggacatcgaacaatccttttgtgataaatgaacggtttgagaaacacatttctgcgcatttatctttgcatatttaaccggatgaaaaaaacggtgaatcgttcaagcaaatatatttttttactttttaagactgatcccagcgttgcgcaaatctgctctcttcgacaatttccacataaaccatcggtataaacgaaaccataaaaatgaaatgctgttttcataaaaaataaaattgaaggttcattttataaaccagacataacgttctacgcttctgtgcgtttttaatttatgctttcatagaattatgtctgcatcacgggaagaacaaaatggataatgctgttgatcgccacgttttttatatttctgatggtacggcaataactgcggaggtattaggacacgcagtaatgagtcaatttcccgtcactatcagcagcatcacgctgccgtttgtcgaaaatgagagccgtgcacgggcagtgaaggatcagattgacgcaatttatcaccagacaggcgtgcgcccgctggtcttctactccatcgtgttgccggagattcgcgccatcatcttgcaaagtgaaggcttttgccaggatatcgttcaggcgctggttgccccgctacaacaagagatgaaactggatccaacgccgattgctcatcgtacccatggccttaaccctaataatctcaataaatatgatgcgcgcattgcggcgattgattacaccctcgcccacgatgacggcattagcttgcgcaatctggaccaggctcaggtgatcctgctcggtgtttctcgctgtggtaaaacccccaccagtctgtatctggcaatgcagtttggtatccgcgcggcaaactacccctttattgccgacgatatggataatctggtgctacccgcgagcctcaaaccgcttcagcataaattgttcggcctgactatcgacccggaacgtctggcggcgattcgcgaggaacgtcgggagaacagtcgctatgccagccttcgtcagtgcaggatggaagtcgcggaagtggaagccttgtaccgtaaaaatcagatcccgtggattaacagtaccaattatagcgtagaagagattgccaccaagatcctcgatatcatgggccttagtcgccgaatgtactaaagaactagtgcattagcttatttttttgttatcatgctaaccacccggcgaggtgtgacacacctcgcacttgaaatcagcagcgattggtttatcgtgatgcgcatcacttcccggcagtcctgccgtagaagcaacaaatttctgagacttgtaatgaacagaactgacgaactccgtactgcgcgtattgagagcctggtaacgcccgccgaactcgcgctacggtatcccgtaacgcctggcgtcgccacccatgtcaccgactcccgccgcagaattgaaaaaatactgaatggtgaagataagcgactgttggtcattattggcccctgcagcatccacgatctcaccgctgcaatggagtacgccacccgtctgcagagcctgcgcaaccagtaccagagtcggctggaaatcgtaatgcgcacctattttgaaaaaccacgaactgttgtcggctggaaaggactaatctccgatccagatttaaacggcagctatcgggtaaatcacggtctggagctggcgcgcaaattacttttacaggtaaatgagctgggcgtcccaaccgcgaccgagttcctcgatatggtgaccggtcagtttattgctgatttaatcagttggggcgcgattggcgcacgtactaccgaaagtcagatccaccgcgaaatggctagcgcactctcctgtccggtaggttttaaaaatggtaccgatggcaatacgcggattgctgtggatgctatccgcgcagcccgcgccagccatatgttcctcagcccagacaaaaatggtcagatgaccatctatcagaccagcggcaacccgtatggccacattattatgcgtggcggcaaaaaaccgaattatcatgccgatgatatcgccgcagcctgcgatacgctgcacgagtttgatttacctgaacatctggtggtggatttcagccacggtaactgccagaagcagcaccgtcgccagttagaagtttgtgaggatatttgtcagcaaatccgcaatggctctacggcgattgctggaattatggcggaaagtttcctgcgcgaaggaacgcaaaaaatcgtcggcagtcagccgctcacttacggtcaatccattaccgacccgtgtctgggctgggaggataccgaacgcctggtcgaaaaactcgcctctgcggtagatacccgcttctgaatgcgtgcccattcctgacggaatgggcatttctgcgcaacttgttgtcttctcaacaaattactgcttgctctggtcagccataatattgataataagaatcattgttatatcaattattattaatttttatgcgttatacggatagcagaaaactcacgcctgaaacggatgccaatcacaagaccgcttccccgcagcctattcggcgaatttccagccagacactgttaggtccggatggcaaactgattatcgatcatgacgggcaagaatatctgctccgtaaaactcaggctggcaagctgctgttgaccaagtaacctttaactgctgcagctgacttccagccgtttaccccagtcaggtggacgactgacatagtcatcatctctgtcgctgaaaggatttcgcaacgcctcatgcaggcggtgcaattccgtcatatcacccttttctgccgcttcaatcgcccgttgcgccaaccagttgcgcaataccagagcggggttaacgctttgcatcagttgctgacgctcactatcgctaacctcgtcttgttgcaaacgcccccgataacgggcaaaccagtcatcaaatgccgcacgatcaataaactcatcacgtagcggactcgccgcgctgtgctgctcggtcagactcagcatgcggaatgtgcgggtataatcgctgcgctctcgcgccatcagactgaataattcattcagtagcgcgttatcctctttttgctccgtcatgaagcccagtttctgccgcatccgttctccataatgcgtcaacaaaacctgctgatagctgtccagggcctcattcagggcatctacggcaacaaatgggctcaatgtctgcgccagacgctgtaaattccacaacgcgacggcaggttgattatcaaagctgtaacgcccttgatgatcgctgtgattacaaataaaaccgggttcgtaatcatcaagaaaaccaaacggcccgtaatcaagcgtcagccccagcaggctcatgttgtcggtattcatcaccccatgagcaaagccgaccgtctgccattgggcaattaagctcgcggtacgtgcgacaacatcgctaaaccagagacggtatttgtcctcatcatctgcaagatgactccagtaatgacgaatagcaaagtcagctaactgacgaaccttttcgctctcgcggcggtagtaaaaatgttcgaaatgaccaaagcgcagatgacttggtgccacacgcatcagcatcgcgcctggctccgccgtttcccgatacactgggctatcgctggtgacgatacttaacgcgcgggtcgtcggaatgcccagataatgcatcgcctcactggcgagactttctcgtatcgtgctacgtaaaaccgcccgtccatcacccattcggctataaggcgtcaggccagcacctttcagatgccagtccattgtagtgccatcagcaagcagttgttcgccgagtaaaatgccgcgcccatcacccagttggcccgcccagacgccgaactgatgaccactgtaaacctgcgccagtggactcataccaggcagtagggcttcgccgccccagacacctgcgccatttttaaacaggctgcttggaatactcagcgtgttagccagttcggtattatgccaaatcagccgggcattatttaaaggcgtaggggaaagtgctgtataggtttctggcaattcatcgcgccagcgggtaacaaaagacagggtcatagatcctcctgtttgatagtgtagacggttactctcgtcttaaacaccagcaaacagaagggttatcgctgaaccaacgtcgttatctgatttatgggaacggcaggccacaggcatccctggagagcatggaaatcgaagggggtaatctgtgccaatatttctgccgtatcaatgcctcccgcaatgatgcaattgcaacaaggggaaatttgcgcctggatcgcacgaataaacggttcgaaggagcggtgcgtgatttgttgctgaataaaacttttatccagcatgacgcgggtgaaaagaccatcaaaaaccgctttcattgtgctattgcctgctcccaaattacctaacacaaggggatacacttggcttaaggataaaagaccgcgattatcttttccttcattgagatgcgggtaattctcattaatcaacagttcaataaacggatattttaatagttcgcctgcgtaattatccctctctaataataatgtagccacttgtggcgttaaattaagccaggcaaagagtttatgttgaataaaaaaatgttggcaactttttagtaattccaactgctcactaaataattgccaatgttgctcctcggtaagttgcgctataacccgactcgtcgggatacgaaccgtaccatcttcactggagaaatgggtaattaactcaacgccgacaaggacttgctggttgtctcttatcggcaggaaatagcaatcagaatgataaagattctccaaaaaaatcttcatggtaaccgtccctctcgaaggatgtttttcagtatccggctaaaagggatgaggccataagacataacaattacagaaggagtaactttcatttgttccatgttaaccactttttcaggggtcctttttttagattatcctgattataaacgaataatccatttacggaatttttgtctgcaaaatactactgtattcaggagtaaatggacggcgatgtatcatcgccgtccatttttcgacatattagattcgtctcgcctgccagaaatttttctgccaatagacattatcaagactggaacgcatcactcccttgctggtagaggcgtggataaattggttgttggtatcgtaaatacctacatgcaaaccattttgtccggaccccgttttgaaaaagaccaggtcacctggcagcaactcgtctttatcaatttgcgtgccaatagaggcttgttgtttggtttcacggggcagctgcaaatcgaaacgatcgcgcatcgtcacaaccacaaatccgctacagtccacaccgcgccgcgtcatgccaccataacgatacggcgtgccatgccagctttgtagctggtcgttcaaaccggcaataacggtaatgctatcagaaagtctggcatttggcggcggtgctttatggtggctacacccggccagaagcagtgctgtgatcaaaataaggcagaaacgcattccgtacggttcctctgttttttattcttgcattaatttagcgtcgtaattacccgattttcaagatactaatgaaatcagatggtgctaatcagcattctgtgaccttcgatatccagacggcgaaaattcatcccataggcctgcgccagatttggcggcgtgagcacctcttccctgcgtccactggccagcatttttccaccttttagcaaccacgcccgatgcgcatgacgcaatgtgtggttgagatcgtgactgctcatcacaatcgccagtccttgctgacacagcgcgctcagaattttgtctaacgcactttgttgcgcaacatcaagactgttcatcggctcatcaagaagcagcaattggcctgcgggattggcttgtggtgtgatttgcaacaccaccgcagcaagacgtacgcgttgccattcaccgccggaaagttgattggtgctacgtccgagtttgtcatcaagagccagcgcccctgcgacatcattcagtagttcggtacgcgttttatcgtgctgatgcagtgtcaggtagtgccagaccggcgttgcaaacggcggcgtctgctgttgactaagataggcgcgatgcagcgcgagttttgttgcggaccatgcttccagtggttgccccgcgaactgaatgcttcccttaccgctggtcattccggccattcgcgccagtaaggtactcttacccgcgccattcggccccaccaggtgcaggatctccccagcccgaacctcgccagaaagcggccccaggcgggtagattccgcaacatcttgtaactgcatcacaatagacattattttgccaacgccagtttaatgctttccatcacaatgggatcttccggcgtcatatccggggaaaaacgctggatgacttttccgtccctgccaaccaggaatttttcaaaattccataaaatatcatccgggtacagcggtgcacggcctttgctgaccatacgggcatagaatccgctctcttccggcgcgactgcggtcggcgctgcggcaatcaatttttgatacagcggatggcgtccttcgccattaacttcaatcttactgaacatcgggaacgtcaccccccatgtggtggtacagtaagttttaatctcttcatcgctgcccggttcttgttccagaaactggttgcacgggaatcccagcaccataaaacctcgatcgacccaggctttctgaatattctccaactgctcatattgcggcgttaagccacacttactggcgacattgacaatcaacagcacattaccggcgaacttctccagcgtggtcacttcaccgtcgatatctttcactacggtcgtcagaatggaatcttgcatcgtttctcctgggtgtggtcagtaaaaatcttagcttttaatcatagaccgtctttttgcggttaacgtcctgcttttaacaataaccagataaacaccggcgcacctaacgttgcggtgaccacgccaataggcagctctgcggcagctaatgccaggcgcgctacaatatcggccagcagcaatgcgctcgcccctgccagcgcgcagccgggaagtaatacgcgatgatcggttaaaccacacaaccggagaatatgggggatcaccagaccaataaagccgatagcacccgccagcgccacactgacgccaaccatccagccggtcgctgccaccagcacattgcgccagaaccacaggggtaaacccagttgccgcgcgctgatctcgccaagtgctaacatattcatcggcctggactgacaacagatccacaacaacacggggatcaatgccagcatcagccagctttgccgccagtctacgccgccaaaaccgcccatcatccagtacatcagctgacgcaaatcaacactggtggaaaagtagatagcccacgtcattagtgcgctacagataatccctaatgcaacgccagccagcaataaccgactggtgctaagatgacgacgggcgaaacgtaagagtattaaagtgatgataagcgcgccagcaatcgcacacagccctagcgcccagttggggagttgcccttgcccaagcaataccgcggcgataagccccacgcctgcgccgttagagacgccaagtagtccaggttctgccagaggattttcaaacaacgcctgcattacagcgccggatatagccagcgccgcaccaaccagcaatacagccagcgtacgtggcaggcgaatttgccagacgaacagttcgccacgaggagtaaaccagtcacctgggctgatccattgttcaccggcgcaaaggcttaagagaagcgccagcagcatcaaaacactcaggcataataaccagcgaatattttgtcgctgttgttggcgggcaagtgtcagcatggtatccgttctgctgaagtgtcatggcgttgattttacggtgactcttcgacagtgaaaagaaaaaaggccgcagagcggcctttttagttagatcagattactcgtctttggggctagcgttttcgacccggctttttaacttctgcccgggtctgaaggtcaccacgcgccgtgctgtaatgggaatatcctcgcccgttttcgggttacgtcccgggcgttgattcttatcacgcagatcgaagttaccaaaaccagagagtttcacctgttcgccgttttccagagcgcgacggatctcttcgaaaaacagttcaaccagttctttggcatcccgcttgctaagcccaagcttatcaaacagatattcactcatttcagcttttgtaagcgccataggttcaatccctcaaacttgcctggaatcgctcttttaatgcctctacacatttggcgacggtagcggcaatctcctcttcttcgagtgtacggctggtatcttgcaggatcaggcttatggcgaggctcttatacccctccgcaacacccttaccgcggtacacgtcaaataagtttacgccaactacctgatttacgccaactttcttacattcggataaaatatccgctgcgggaacgttttctgcgaccaccaccgcgatgtcacgacggttcgccgggaagcgagaaatctcgcgcgcctgaggcaccacgcggtctgcgagcttgttccactccagttcgaacaccagagtgcgaccgttaagatccagtttacgttccagttcaggatgaacaaccccaacaaaaccaatacgttcacctttcagataaatcgctgcggattgccccggatgcagtgccggattcgcttctgcacggaactcaacctcattcagtttaccggtcaggtcgagaacggattcaagatcgcctttcaaatcatagaaatcaacggtctcttttgccaggttccagtgctcttcgtaacggttaccgcaaatcacaccggctaacatcagatcctgacgaatgcccaacggtgcctgagtatctggtacgaaacgcagaccgctttcgaaaatgcgcacacggttctgctgacggttctggttgtacaccacggttgccagcaggccagtccacagagaaagacgcattgcactcatttcaacagagatcgggcttggcagcagtaaggcttcaacgcctggatggatcatctgctgcactttcggatcaacgaagctgtaggtgatcacttcctgatagcctttgtcgttgagcagcgttttcacgcgcttgaggctcaggtcagcttcacggtgagtacccataatcaggcttgcctgtaccggctcatccgggatgttgttgtagccgtaaacacgcgcgacttcttcaaccagatcttcttcaatctccatatcgaaacgccagctcggcgcaactgcctgccattcgtctttgccttcggtcacttcgcagccgagacgacgcagaatgtcagttacctgctcatccgcaatatgatggccgatcaggcgatccagtttgctacgacgtagagtgatggttgcacgcttcggcagcgttgcttcgttggtgatatcaattaccgggccagcctcaccaccgcagatgtcgatcagcagacgggtcgcacgttccatcgctttgtgctgcagtgccggatcaacgccacgctcataacggtgagacgcatcggtatgcaggccatgacgacgagcacgaccggtgatagacagcgggctaaagaacgcgcattccagcagcacgttttgtgtttcgtcattcacgccagagtgttcgccaccgaagatgccgcccatcgccagcgccttgttgtggtcggcgatgaccagagtgtcagcattcagcttcgcttcagtaccgtcgagcagcaccagcgtttcgccctctttcgccatccgcaccacaatgccgccttcaatgcgatctttatcgaaagcgtgcatcggctggcccagttcgagcagcacatagttggtgacgtcaacaactgcatcgatagaacggatcccgcaacgacgcagtttttctttcatccacagcggagttggcgctttaacgttaatgccttttaccacacggccaagataacgcgggcaggcttccggcgcttcgactgtaatcggcagcgtgtcgtcgatggtcgcaccaaccggaacgatttccggttgaaccagcggcagctggttcagcacggcaacgtcacgcgcaacaccaatgatgcctaagcagtcggcacggtttggcgtcacgctgatttcgatggtgttgtcatcaagtttcaggtattcacggatatcggtgccaatcggcgcatccgcaggcagttcgataatgccgctgtgatcgtcagaaatgcccagttcagagaaggagcacagcatcccttcagacggttcgccacgcagtttcgccgctttaattttgaaatcacccggcagaacagcaccaatggtcgctaccgctacacgcaggccctgacggcagtttggcgcaccgcagacgatgtccagcaggcgatcgccgccgacattcacttttgtcacacgcagtttgtcagcgttcggatgctgcgcacactcaaccacttcaccaacgaccacgccgtggaagctgccggcaaccggttctacaccgtcaacttccaggcccgccatagtgatttgatttgccagcgcatcgctatcaatcgccgggttcacccattcgcgtaaccacagttcactgaatttcataatctattcctgccttatttaaactgtttgaggaaacgcagatcgttttcgaagaaactacgcaggtcggtgacgccgtaacgcaacatagtcagacgctccatccccatcccgaaggcgaaaccagagtaaacttccgggtcgatgccaacgttacgcaacacgttcggatgcaccatcccgcagcccagcacttccagccatttaccgtttttacccatgacgtccacttctgcagaaggttcggtaaacgggaagtaggaaggacggaagcgaatctgcaaatcttcctcaaagaagttacgcaggaagtcgtgcagcgtgcctttcaggttggtaaagctgatgttggtatcaacaatcagaccttccatctgatggaacatcggcgtgtgagtctggtcgtagtcgttacgataaacacggccaggcgcgatgatacgaatcggtggctgctgggctttcatggtgcggatctgtacgccagaggtctgggtacgcagcaggcgggtagtgtcaaaccagaaagtgtcgtggtcagcgcgcgccgggtggtgaccaggaatgttcagagcatcgaagttatgataatcgtcttcgatttccggcccggttgccacggtaaagccaagctcaccgaagaaactttcgatacggtcgatggtacgggtaaccggatgcagaccgccgttttcaatgcgacgacctggcagagagacatcaatcgtttccgccgccagacgcgcattcagtgcagcgctttccagttccgctttacgcgcattcagcgcctgctgaacctgctctttcgcttcgttgataaccgcaccagctgccggacgctcttctggcggcagctcacgcagggtcgtcatctgaagggttaagtgcccttttttacccaaatattcgacgcgcacattatctaacgcggcaacatcactcgcctggctaatggccgccttcgcactggcaaccagttctgcgagatgactcatggttttcctcattgtgtcagtggtgacactggttcgttggacttagagcctatcccatcaggctattttacttgccattttggtcccgggctgtgctcgaaattctcacgtacttaaatacgctccggtttctccgcgctggccgtgtccagtctggctgcgacaattacacctgatgagacaggctttttatttttcaaaacgcgcatacaaaaaaagcctccactgggaggctttcaggcgctgttttccgtttctcttctcacgcgctagcctcctggattcaggtgctaaagtaaaaaaagaagcggaaaatagcagcattcattgcttgcgttaccttttggtactcttcaaaagacctttattgaaaaggctacggcgataaaagtcaatgttttgatggcgttgaaacgaaaagagggagactagctccctctttcaactggcttatgccagagctgctttcgctttttcaaccagagcggtgaacgctactttgtcgaatactgcgatatcagccaggatcttacggtcgatttcaacagaggcttttttcaggccattgatgaatttgctgtaagaaataccgttctgacgtgctgctgcgttgatacgcgcaatccacagttgacggaactgacgcttacgttgacgacggtcacggtaagcatactgaccagctttgataacagcctggaaggcaacgcggtatacgcgagaacgcgcaccgtagtagcctttagcttgtttcaaaattttcttgtgacgtgcacgtgcaataacaccacgttttacgcgagccatatgtgctctcctgtatctatattctaattaaaaagttaaaaacgttaacggcttatgcgtacggcaggcacgcgattaccaggcccagatcgcctttggaaaccatggctttcggacgcaggtgacgtttacgtttggtcgcttttttggtcagaatgtgacgcaggttagcgtgcttgtgcttaaaaccacctttaccggtttttttgaagcgcttagcagcaccgcgtacggtcttaatttttggcattttaataacttccacttcgcattgttaataaacgaaacaaaggcgaacaaagcctgtgaagcccgaaggctccacagacagtgctacttgaaggccttactgtttcttcttaggagcgagcaccatgatcatctggcggccttcgatcttcgttgggaaggattcgaccactgccagttcttgcaaatcgtctttcacgcgattaagcacttccataccgatttgctggtgcgccatctcacgaccgcggaaacgcagcgtgattttggctttatcaccctcttcgagaaagcgaatcaggctgcggagttttacctgatagtcgccttcatctgtaccaggacggaatttaatttccttaacctggataactttttgctttttcttctgttccttagaagacttgctcttttcatagaggaatttgccgtaatccattatacgacaaaccggcggctcggcgttagggctgatctcgactaagtctactccggcttcttctgctttctccagagcttctctcagactcacaataccaagctgctcgccttccagacctgttaagcgaacttcctgggcgcgaatttcgccattgatacggttagggcgcgccgtttgaactcgttttccgcctttaataccttattcctccaattgtttaagactgcggctgcgaatctcttgttgcagcttctcgatcacttcatttacgtccatgcttcccaggtctttaccacggcgggtgcgaacggtaactttgccactttccacctctttatcaccacagaccagcatatatgggacgcgacgcaaagtgtgctcgcggattttaaagccaatcttctcatttctcaagtctgctttaacacgaatgcccgcattacttagtttttgcgtcaattcgttaacgtattcagactgactatcggtaatattcatgataacaacctgaaccggcgcaagccaggtcgggaagaaaccagcgaactcttcggtcaggataccgatgaaacgttccatgctccccagaattgcgcggtgaatcattaccggtactttacgttcattgtcttcgcctacataagaagcgctcagacgagacggcaaagagaagtccagctgtactgtaccgcactgccatgcacgatcgaggcagtcatacagggtaaattcaattttcggaccgtagaaagcgccttcacccagttgatattcaaacgggatgttgttttcttccagcgcaaccgccaggtccgcctcagcacgatcccacatttcgtcgctgccaatacgtttttcaggacgagtggagagtttgacgacgatcttctcgaagccaaaagtgctgtacatatcatagactaaacggatacatccgttaacttcatcgcgaatttgttcttcagtacagaagatatgcgcgtcatcctgggtaaatccacgcacgcgcatcaggccatgcaggctaccactcggctcgttacggtggcagctaccaaactcggccatacgcagcggcagatcgcgataagacttcagcccctggttgaaaatttgtacgtgacccgggcagttcatcggcttaatgcagtattcacggttctcagaagatgtggtgaacattgcatctttgtagttgtcccagtgaccggttttttcccacaggacacggtccatcatgaacggacctttaacttcctgatactggtactctttcagtttagaacgaacaaacacttccagttcacggaagatggtccagccgtcgttgtgccagaataccatacccggcgcttcttcctgcatatggtacaggtcgagctgtttaccgattttacggtggtcgcgtttcgcggcttcttccaggcgctgcaggtaagcgttaagtgcttttttgtctgcccacgccgtaccgtaaatacgttgcaacattttgttgttgctgtcgccacgccagtaagcccctgccgttttcattagtttgaaatgatggcagaaacgcatgttcggtacgtgcggaccgcggcacatatcgacatattcttcatggaagtacagacctggcttgtcatcatgggcgatgttttcgtcaagaatggagactttgtagctctccccacggttggcgaaagtttcacgcgcttcgtgccagctgactttcttcttaatgacgtcgtagtttttctcagcaagctcatgcatccgcttctcgagtgcttcgacatcttcctgggttaacgtgcggtcaagatcaacgtcgtaataaaaaccgttgtcaataaccgggccgattgccattttggtatgcggccaaagttgtttaatcgcgtgccctaacaggtgcgcacaggagtgacgaatgatctccagaccttcttcgtctttggcggtaatgatgctcagttgtgcgtcgttttcaatcagatcgcaagcatcaaccagttcgccattaacgcgccctgcgatacaggctttcgccagacctggaccaatgtccagcgcaacatccatggggcttacagcgtgatcgtaatggcgttggctgccatcaggaagagttataacaggcattttatatccttatttgcagtggtgacccacacgaaagatcacatacaaagaaaaatttgtttattaacagttcattgcgaaaccatctagccaacaaatgctaaattggttcgcaatcaggtacacaaatgaaagacattaacctctcaccttccacccggttgagcgatgttaacactaaaaaaagggagattgtacctttccgtttcacattgattcgattcgcaattcgtttgtagtgagtacaccagcaaaacgcttaaagaacaactgataacatcacggtgcgtctgaaaggtttactgcgagcggatttacagcagcataaactgaatccagcaaagttcgttgcgtgatttggcggtagtattttaaacgctcatgagattaatgacgaagtggtcatatcacaatgataaaagtgacacaattcttataacaatttttcgtgcacatttcgttctggcgataataattaatcatcatcctcaaaacctccagatatatataaggcgaacagattatgagtcaaaacgatatcattatcagaactcattataagtctcctcatagattgcacatcgatagcgacataccaacaccttcatcagagcctattaatcaatttgcgcgccagctcatcaccctacttgatacctctgacttaagttcgatgctgtcatactgtgttactcaggaatttaccgcaaactgtcgaaaaatatcacaaaattgttattccactgccctttttaccattaactttgccacttcacccatccatacagaaaatatactcattacattacactataaaaaagaaatcatttccttattactggaaaccacgcctattaaagctaaccatttgcgaagcatactggattatattgaacaggaacagttaactgctgaagatcgtaaccattgtatgaaactgtctaaaaaaatccatagagaaaaaaactatacacccaacagtaaatctcaatggtagtgcatgttttttgcaatctccttctgacgctattttttgtcgccatctgtcattgcaatacgcccttgattcattgagaaatggaaaaggcaaagtcaacctgattaaacattactcctccgttgaatccatacagcagcatgtccccttagtccgggacgcggagttcagagcattacttcgccatcctcctgcagggagtcgcgttatcgcgagtaaggattttggcttcgctttagatattttcttttgtcgaatgatggcaaacaatgtcagtcatatgtccgcgattttatatatagacaatcatactttgtcagtaaggctacgaataaagcagtcagtgtatggacaattaaattatgttgtgtccgtttacgacccgaacgataccaacgttgccgtcagagacacccacaggacagcacggggctttctttcgcttgataagttcatcagttcaggtcccgatgctcagacctgggctgatagatatgttcgcaactgtgcaattgctattctgcccctattacctgtgggagttccaggggctattttcgcgggtattgcatcacgaatgccatttgcccctatacatccatcggcaatgttgttaataatggctacaggccagtctcaacagcttattacattattcaaacagttgcccatactccctgaaaaagaaatcattgaaataataactgcgcagaatagcgttggtacacctgctttatttttggctatgatgaacggacatactgacaacgtgaaaatatttatgcaagaaattcagtcactggtagataatcacatcattcatgaagataatctggttaaattactgcaaactaaaagtgctaacgaaacacctggactttatatctccatgttgtatggattcgatgaaataatcgatatctttctgaatgcattaaccactccaatagcacaagagcttttaaacaaaaaactggtgatgagtattttagccatgaaaatacatgatggtgagccaggattatacgccgcaatggaaaataatcaccctttgtgtgtcacacggttcctctctaaaattaatggcatcgcctttaaatacaagttgagcaaagctaacatcatggatttattaaaaggagctacagcacagggaacccctgcattatacatcgccatgagcaagggtaatgaagacgtcgtgttatcttatatatcgacgctgggtgcttttgcaaaaaaacattcttttagtcaacatcagttatttacactattggccgctaaaaatcatgacaacatgtcagctgttcatatagccattcatcataagcattataaaactgtagaaacatattatgctgctattaatgcaatcagccaaagcctgagttttagtgctgatgaaataaagacgtatttataaccagctatttacgatatatatcgatacataattttatttttttcataaaacgcagaaacagtgaccatgtgcacaacgccacccgacggctgtaataacaaaaaatcccttgatgcctgtcccttttgttacactccgttatcacgcacaagagatatgcaggacactggtatgccgactaaacgctttgataaaaaacactggaagatggtggtggtgctactggcaatctgtggcgctatgttgttgctacgttgggcagcaatgatttggggctgagcagtgacaaacgaagacagccagaccgcataacacggtccggcagataattttacatgctgtagcccaggcttaaggttgtccgacggtcggtatgttccggtgcagactctggaggttcagagttccatgtgacgttgtaagccaccttcagtccaaaatgttcattaatagcaacatttaatgcgctttcggagttcagcgttgtgtcttccgcgccaaagacgctaacaccctgcgtaaatttagcgttgtcagtcaactgccatgcataagccccggaggcatagcccagcggctgggtttcactggcattgtcggtatatttgtcgtaacgcacacctggaccgaattcaaagcggaaactgtgtaccgggccattcaaaaactgacgaccataacccgcggtcaacacatcgcgctctcgatagccgttataacggtctgtcagccagcttgcctgaccaaataaatagtcataatcagttaaattaaaacggctacgcccgcccgccgcatatttttcactagaacgctcatcattagaagaagtattactggcgttcccccacaggctccaggcagtggtgtgtccataccaggtcatggtggtgtcagccgtaagactggagcttttcgtattgccactttgtgcaagatatcctgcgttcagattaccttcgaaaggttttttagcgctggcaggatcatccatgacagtaaaaacggaatcatcggcagctgcattcagactcgcaaacatgccccccgccaacataacgatggcaggaactgtcttcaaaagcttcatttatcaagagtccgtacaacaaaaaaagagaccatcgcggtcccggaaactttcttaaggatcaaagattagcgtccctggaaaggtaacgaattataaaaaggcgcgaataacttagcaatgtattcttatttcattttttgaataagcatgtggcgaaaacagatttttatttatatatatttatctgcaaaattttaaataaagctccaataaatcatattgttaatttcttcactttccgctgattcggtgccagactgaaatcagcctataggaggaaatgatggtacgtatctatacgttgacacttgcgccctctctcgatagcgcaacaattaccccgcaaatttatcccgaaggaaaactgcgctgtaccgcaccggtgttcgaacccgggggcggcggcatcaacgtcgcccgcgccattgcccatcttggaggcagtgccacagcgatcttcccggcgggtggcgcgaccggcgaacacctggttagtctgttggcggatgaaaatgtccccgtcgctactgtagaagccaaagactggacccggcagaatttacacgtacatgtggaagcaagcggtgagcagtatcgttttgttatgccaggcgcggcattaaatgaagatgagtttcgccagcttgaagagcaagttctggaaattgaatccggggccatcctggtcataagcggaagcctgccgccaggtgtgaagctggaaaaattaacccaactgatttccgctgcgcaaaaacaagggatccgctgcatcgtcgacagttctggcgaagcgttaagtgcagcactggcaattggtaacatcgagttggttaagcctaaccaaaaagaactcagtgcgctggtgaatcgcgaactcacccagccggacgatgtccgcaaagccgcgcaggaaatcgttaatagcggcaaggccaaacgggttgtcgtttccctgggtccacaaggagcgctgggtgttgatagtgaaaactgtattcaggtggtgccaccaccggtgaaaagccagagtaccgttggcgctggtgacagcatggtcggcgcgatgacactgaaactggcagaaaatgcctctcttgaagagatggttcgttttggcgtagctgcggggagtgcagccacactcaatcagggaacacgtctgtgctcccatgacgatacgcaaaaaatttacgcttacctttcccgctaacaaaaacattcccccagcattgggggaatcatcaccaacctgtcggcaacgcgtttctccgactatgctcaaaagtcatgtgataacaaaggggtgaactatggccagtggcgatcttgtccgttatgtcataaccgtcatgttgcatgaggatacattgactgaaattaacgagttgaataattacctgactcgcgacggttttttgctcactatgacggatgatgagggaaatatccatgagctgggaactaacacttttggacttatcagtacccaaagtgaagaagaaattagagaactggttagcgggcttacccaaagtgcaaccggcaaagatcctgaaatcaccatcacgacctgggaggaatggaatagcaacagaaaataaatggtttttgggcaataatcagtctgtggtgtgcgttagctcgtgtttttacaccgcattcttgcgctaaccttatgatctggcagacaacatgggagagacatcatgtggcaggcaatcagtcgtcttttgagcgagcagttaggtgaaggcgaaatcgaactgcgtaatgaactgcctggcggagaagtccatgccgcatggcatttgcgctatgcaggacatgattttttcgtcaaatgtgatgaaagggaactgcttcccggttttaccgccgaagccgaccaactggagttactgagccgtagtaaaaccgtcaccgtgcctaaggtttgggcagttggcgctgaccgtgactacagttttctggtgatggattatctcccacctcgtccgctggatgcgcatagcgcatttattcttggtcagcaaattgcgcgtttacatcaatggagcgaccaaccacaatttggccttgatttcgataacgcgctctccacaactccacagcccaacacctggcaacgtcgctggagtacgttttttgctgaacaacggattggctggcagttggaactggctgcagaaaaagggatcgctttcggcaatatcgacgccatcgtcgagcatattcagcagcgtctggccagtcatcaaccgcagccttctctgttgcacggcgatttatggtccggcaactgtgcactgggtccggatggcccgtacattttcgacccggcctgctactggggtgaccgagagtgcgacctggcgatgttaccgctgcatactgaacagccgccacaaatctatgacggctatcagagtgtatccccgctacctgccgatttccttgaacgtcaaccggtttaccaactctacacgctgttaaatcgtgcaaggttatttggcggtcagcatttggttattgctcagcagagtttggatagattattagcagcatgatatgggttgaggataatggccgctccgtgcggccttttgattaaataaacccaagcagagaaaagaacacataacctgcagcaatacaaataaccggcaggatatacagactgaaaaactgcaggaaaatagtatggtgcggaacaacaatacgggactcaatttgttcacgcgttagcccctcttcccctttggctttttccagaatgagttgatcttcaacaccttcccgcaagaagcgcgcctggcgactcatccgggcaccggaatcctgcaacgccagtccgacaaaaatcaggatgaaaatcacccagaacataacgttcacgccaccattaaaattgggcgtcggggagttataccagaatagattcaaaaaaggcgtattcgcctgcatcatatcgatcatgacatgagtaaagtcgagcatgaccgcattaatgccttccttgttttcctgccgggtattcataaatttcagcaaagaaatcaatgtagagatcaatgcaggtataaaaatcacccaacccaaaatccttttcaaaacagcaatgcgtccagcttgttgatacgtcatgagttctccttgattaagacgcgtcgtttcacttagtttacctgtagatatctgttttcgcccattctttaaaggcgatatgataggcgcttaatcataagcacggcttaataccttacacataatgctctaaaggagaggttgtaatgagtaccccgcgtcagattcttgctgcaatttttgatatggatggattacttatcgacagtgaacctttatgggatcgagccgaactggatgtgatggcaagcctgggggtggatatctcccgtcgtaacgagctgccggacaccttaggtttacgcatcgatatggtggtcgatctttggtacgcccggcaaccgtggaatgggccaagccgtcaggaagtagtagaacgggttattgcccgtgccattagtctggttgaagagacacgtccattattaccaggcgtgcgcgaagccgttgcgttatgcaaagaacaaggtttattggtgggactggcctccgcgagtccactacatatgctggaaaaagtgttgaccatgtttgacttacgcgacagtttcgatgccctcgccagcgccgaaaaactgccttacagcaagccgcatccgcaagtatatctcgactgcgcagcaaaactgggcgttgaccctctgacctgcgtagcgctggaagatagcgtaaatggcatgatcgcctctaaagcagcccgcatgcgttccatcgtcgttcctgcgccagaagcgcaaaatgatccacgttttgtattagcagacgtcaaacttagtagcctgacagaactcaccgcaaaagaccttctcggttaatgaccaggggcagtgatctcgctgcccctggttctttatctgaaattgcattcaactgacggattaatcgtcaatttaagagaaagagttacaccgtcaccacttccgtgcactgtataaaaatcctatactgtacgtatcgacagtttagtgagttttatcatgacggcggaaggtcaccttctcttttctattgcttgtgcggtatttgccaaaaatgccgagctgacgcccgtgctggcacagggtgactggtggcatattgtcccttccgcaatcctgacgtgtttgttaccggacatcgatcacccaaagagctttcttgggcagcgattaaaatggataagtaaaccgatcgcccgcgcttttgggcatcgtggttttacccacagtctgctggcggtatttgcgctgctggcaaccttttaccttaaggttccggaaggctggttcattccggctgatgcgctacaaggaatggtgctgggttatttgagccacatacttgccgatatgctgacacccgccggtgttcccctgctctggccatgccgctggcgtttccgcttgcctatcctggttccccaaaagggcaaccaactggaacgttttatctgcatggcattatttgtctggagcgtatggatgccccatagtttacccgagaacagcgctgttcgttggagtagccaaatgatcaataccttgcagatccagtttcatcggcttattaagcatcaggttgaatactaaaaaggcaaaaatcacctttctggaataagcaattccatttgaatataagagccagctcacagttctgttaatcttgcgccaacactatgactgctacgcagtgatagaaataataagatcaggagaacggggatgaactttccattaattgcgaacatcgtggtgttcgttgtactgctgtttgcgctggctcagacccgccataaacagtggagtctggcgaaaaaagtgctggtgggtctggtgatgggtgtggtttttggccttgccctgcataccatttatggttctgacagccaggtacttaaagattctgtacagtggtttaacatcgttggtaacggctatgttcaactgctgcaaatgatcgttatgccgttagtcttcgcctctattctgagcgcggttgcccgtctgcataacgcatctcagttaggcaaaatcagttttctgaccatcggtacgcttttgtttaccacgctgattgcggcgctggtcggtgtgctggtcaccaacctgtttggtttgacggctgaaggtctggttcagggtggtgcagaaactgcacgtctgaacgccattgaaagtaactatgttggtaaagtctctgatctgagcgttccgcagctggtcttgtcctttatcccgaaaaacccgtttgccgatcttaccggagccaatccgacgagtattatcagcgtggtaatttttgccgcattcctcggcgtagctgcattgaaactgctgaaggatgatgcgccgaaaggtgaacgcgtcttagccgctatcgataccctacaaagctgggtgatgaaactggttcgcctggtcatgcagttgaccccttacggcgttctggctctaatgaccaaagtggttgcaggttctaacttgcaagacatcatcaaactgggaagtttcgttgtcgcgtcctacctcggtctgctgattatgtttgcagtgcatggcattctgctgggcattaatggcgtgagtccgctgaagtacttccgtaaggtatggcctgtgctgacgtttgcctttaccagccgttccagtgctgcgtctatcccactgaatgtggaagcacaaacgcgtcgtctgggcgttcctgaatccatcgccagtttcgccgcctctttcggtgcaaccattggtcagaacggctgcgccggtttgtatccggcaatgctggcggtgatggttgcgcctacggttggcattaacccgctggacccgatgtggattgcgacgctggtcggtattgttaccgttagttccgcaggcgttgccggtgtcggtggtggtgcaactttcgccgcactgattgtactgcctgcgatgggcctgccagtaaccctggtggcgctgttaatctccgttgaaccgcttatcgacatgggccgtacggcgttaaacgttagtggcagcatgacagctggcacgctgaccagccagtggctgaagcaaaccgataaagccattctggatagcgaagacgacgccgaactggcacaccattaattcttatgctggcaacggtccgttttgtataggggccgttgccttactttttaaatgttccatcgcggcgatgcatacactctcatatttaaacagatcgtcagcgaaaaaaatgtccaacttatcaatacattcctggctcaaactatgtgcctgtaggctgaagcttaaaacctcatacccgagacgttttctaagactactatctggaatactcataatatcttcaagcacaccacttcccattcccggaagatttagtggattaaaaagaagattgatattaagcatacttattatgctaggaaactttaggagactctcatttttttgaatcgcagcaaaaatgctcccgacaggatgtatataattttgttcatagtatatagtccttaaatagtgaataaccaacctgttttttatactgatcaaattggtcattttttctgggcgaaatacagaagtgacatccattccaataaaatctttatttatacctcttatccgaatttcactaccataaagattattaattattactctatatttaacattgtcctgcagatatgtatcaaaactaagtgctggcgctcctggcttactggcatcatagttaatgttagacatataggcaatcatataattaaagttactttctgctatttcatcgcagtcacattgacccgtacttataaagaaagtgagtgctgtcatagtagactgcagcctttctttaaaagagtcgaaagccaggcttttaatatttaaatcaccataattactctgtattaagtttgtagaaaacatctcccgcctcatattgttaacaaaattattatctcatttaaatctaagtcatttacaatataagtttaagagcgacgccacaggatgaactatcaaaaatagctcatcatgattagcaaaacttaaccattttaaaataaataaacaattaaagaaaaaagatcacttatttatagcaatagatcgtcaaaggcagctttttgttacaggtggtttgaatgaatgtagcaacgaaatacagaatttcaggtcatgtaactcccggcaaaaccgggaggtatgtaatccttactcagtcacttccccttcctggcggatctgatttgcccaacgttgggcagattcaggcacagtaaacgccggactgcgcagaaaactctctcccatcagtacaaacgcaacatatttgccacgcagcatccagacatcacgaaagctatccatctttatcgcatgttctggcggcgcgggttccgtgcgtgggacatagctaataatctggcggttttgctggcggagcggtttcttcattactggcttcactaaacgcatattaaaaatcagaaaaactgtagtttagccgatttagcccctgtacgtcccgctttgcgtgtatttcataacaccgtttccagaatagtctccgaagcgggatctggctggtggtctatagttagagagttttttgaccaaaacagcggccctttcagtaataaattaaggagacgagttcaatgagccaacataacgaaaagaacccacatcagcaccagagtccactacacgattccagcgaagcgaaaccggggatggacagtctggcacctgaggacggctctcatcgtccagcggctgaaccaacaccgccaggtgcacaacctaccgccccagggagcctgaaagcccctgatacgcgtaacgaaaaacttaattctctggaagacgtacgcaaaggcagtgaaaattatgcgctgaccactaatcagggcgtgcgcatcgccgacgatcaaaacagtctgcgtgccggtagccgtggtccaacgctgctggaagattttattctgcgcgagaaaatcacccactttgaccatgagcgcattccggaacgtattgttcatgcacgcggaagtgccgctcacggttatttccagccatataaaagcttaagcgatattaccaaagcggatttcctcagtgatccgaacaaaatcaccccagtatttgtacgtttctctaccgttcagggtggtgctggctctgctgataccgtgcgtgatatccgtggctttgccaccaagttctataccgaagagggtatttttgacctcgttggcaataacacgccaatcttctttatccaggatgcgcataaattccccgattttgttcatgcggtaaaaccagaaccgcactgggcaattccacaagggcaaagtgcccacgatactttctgggattatgtttctctgcaacctgaaactctgcacaacgtgatgtgggcgatgagcgatcgcggcatcccccgcagttaccgcaccatggaaggcttcggtattcacaccttccgcctgattaatgccgaagggaaggcaacgtttgtacgtttccactggaaaccactggcaggtaaagccagtctcgtttgggatgaagcacaaaaactcaccggacgtgacccggacttccaccgccgcgagttgtgggaagccattgaagcaggcgattttccggaatacgaactgggcttccagttgattcctgaagaagatgaattcaagttcgacttcgatcttctcgatccaaccaaacttatcccggaagaactggtgcccgttcagcgtgtcggcaaaatggtgctcaatcgcaacccggataacttctttgctgaaaacgaacaggcggctttccatcctgggcatatcgtgccgggactggacttcaccaacgatccgctgttgcagggacgtttgttctcctataccgatacacaaatcagtcgtcttggtgggccgaatttccatgagattccgattaaccgtccgacctgcccttaccataatttccagcgtgacggcatgcatcgcatggggatcgacactaacccggcgaattacgaaccgaacagcattaacgataactggccgcgcgaaacaccgccggggccgaaacgcggcggttttgaaagttaccaggagcgcgtggaaggcaataaagttcgcgagcgcagcccaagctttggcgaatattattcccatccgcgtctgttctggctaagtcagacgccatttgagcagcgccatattgtcgatggtttcagttttgagttaagcaaagtcgttcgtccgtatattcgtgagcgcgttgttgaccagctggcgcatattgatctcactctggcccaggcggtggcgaaaaatctcggtatcgaactgactgacgaccagctgaatatcaccccacctccggacgtcaacggtctgaaaaaggatccatccttaagtttgtacgccattcctgacggtgatgtgaaaggtcgcgtggtagcgattttacttaatgatgaagtgagaagcgcagaccttctggccattctcaaggcgctgaaggccaaaggcgttcatgccaaactgctctactcccgaatgggtgaagtgactgcggatgacggtacggtgttgcctatagccgctacctttgccggtgcacctagcctgacggtcgatgcggtcattgtcccttgcggcaatatcgcggatatcgctgacaacggcgatgccaactactacctgatggaagcctacaaacaccttaaaccgattgcgctggcgggtgacgcgcgcaagtttaaagcaacaatcaagatcgctgaccagggtgaagaagggattgtggaagctgacagcgctgacggtagttttatggatgaactgctaacgctgatggcagcacaccgcgtgtggagtcgcattcctaagattgacaaaattcctgcctgatgggaggcggcgcaattgcgccgcctcaaatgatttacatagtgcgctttgtttatgccggatgcggcgtgaacgccttatccggcctacaaaactgtgcaaattcaatatattgcaggaaacacgtaggcctgataagcgaagcgcatcaggcagttttgcgtttgtcagcagtctcaagcggcgcagttacgccgcctttgtaggaattaatcgccggatgcaaggttcacgccgcatctggcaaacatcctcacttacacatcccgataactccccaaccgataaccacgctgagcgatagcacctttcaagctcgcacttgtcaacacatccagctccgttaagcgtgggaaacagtaagcactctgacggatagtattatcgataaacgccggatgacacatcacctccaggctacgatcaccccgatggcctgcgtcatccagcacttgcaggaacaggctctcactgatctcttcaccgtagaatgcactgctgaatccctgggtagtgcgcaggttgaccggcaaatcaaacgccatctgacgatccgcccgcaacgcaatgccctgctctgccgcaaacctggcaacaatcgggaaaatctgcgggaacatatgcacatgatgatggctatcaagatgcgtaggtttgcgtccaaatagctcaatgaaacgcaaatactgactgacaagctcctgagtaatttcttccagcggtaaagcatcttcttctgccaactgccagatccattttcccagcacaccatcgcgggttaaccccggcatagctgtcagtggcttacccatagtaaggacaaagtgcatccctatggccagactcggttcatcacgactcaactgcaccgcatggtcaatagcctgcccattcaccagcgccgtcgtgctcgtgacaatcccattgcgacaggcctcgataatgccgtagttctgacctttgcttaagccaaaatcatcggcattaacaatcagtaagcgttccataatcagcctcggttaatgtgcttttttaagctctgcgatgcagtcggcaaagtttggcagccatttctcgtgcgccagaatcatctcgcgtgccagcagctcagcatcgcgatcggaatgcaccaacggactaaggtttagcgccagtaacacatcgttaaattctccgctaagtgcggcgttactggcagcaatctcgaagcctttaatggtgtgaatcagccccattactttatcatcgaaatgcgtaatgcgcggatgtggcgtcgcgccatcgcgccccagcttacaggtcatttctactgcccagtctgccggaatattatcaatctgcccatgatgcgggatattaacgtaatgttctgcttgcttgtcgttgtagatagcgttgatcacttcgcatgctgcatcagagtaataagccccaccgcgctgttccagttctttcggcttaactttcagctcaggatttttatacagctcaaaaagttgtttctcgactttctgtactacctgcgctcgtgcgccgcctttgtagtattcgcccatttcaatagccagcatctctttctgcttgaagtaatacagcagataagaacatggcagcagattcaagctacgaattaagccctcactaaatggcagatcgaaaatattttttacagaggacgcttttaactgcccactcgccacaccatcaagcaattcggcaaagcggctcttgccatttatcagcacatccttaatgaacaccatatggttgaggccgaacaaatcgatagataaatcatcgctgtctttcagcatcagaacatcgcgaataaacatcttcatgccgatcggaatattacacacgccgataaagcgtttaaatccggtatgacgataaacggcttcagtgaccattcccgccgggttagtgaagttaatcacccatgcattcggacaaagttcttcgacatcttttacgatgtcaaaaatcaccggaatggtacgcagacctttaaacaaaccgcccgcgccgttggtttcctgaccaagataaccatgacttaatggaatacgttcatccagttcacgcgccggtaattggccaacgcgcagttgggtagtaacgaaatcagcatctttcaatgcttcgcggcgatccagcgttttataaagcttcatcgggacgccagcgttatcaatcatccgttggcagagatcgaaaataatatccagtttcggtttaccaccttcgacatccaccagccataattcgctgaccggcaattcgtgataacgcttaataaatccttccagtaactccggggtatagctgctcccgccaccaatagtgacgacttttaatttctggctcataatttctcccttcagtacagaatactgatatctggcatatctgcccccccggacataaataatccagcaacaggacagatatgtgaattgtcaggtataacgacttactgattaaattcagtcaatttcttacgatagctcttaggcgtaaaggacgttaatttcttaaacgttttaataaacaaactcgggctactataaccggcctcaaacgcaatatccgtcacactatagttggtcatttccagttgttttttggcaaaattaatacggatttcattaataatctgcattggcgttttgccataatatcgttgagtcgctcgcgtcaaatattcctgacttttggcactcaacgccaccatattctccagcgcgctttcactaaactgctctttatcatgcatcttttctaccgtacttttcagccactgcggtacatcatcaatcacctgttcttcgcggtaatgacgtaaacggttaatgacataaaaagtaaccatctcaacaaactcttccagccctgtttcgcggaaattcaaactagaaatcactgtttccacataggtgagaaaagcgttattggtccggtatacctggctagcgacaaagcaataaggcaacaatggcaggtaatgctgctcaaaaaagcgtttactgatcccaacgttcaatatgcgcgtggcaccaaactcataaaaactttgatggtggctacctaacggaataaaaacaaaatcgccccgttccagtaacacgcgcttaccgttaatctcctggaaataacgcccggttaataccagagtaaattcataatagtcgtgctgatgcagtccgctgatactctcagttttgttatagataaacacatggaagtttttgccattaaacaactgctgttctcgggcagtggcaatttccggcgcgttaatcactggctgcatcatcgactccttatgccttcagtttttcatgaagctcaattaattcagtaatcagttcacgcgcaagcatggacgtcattaaatgatcctgagcgtggaccagcaccagactcactttcatcttaccttcgcccgcatcgccttcaatcagtttcgtctgtaccagatgcgcttcattcaatgccatccgactctgatccatcatggcttttgctgcggcaaaatcgccctgcttcgcctgtttcagtgccgcatacgccaggctgcgcgcttgtccggagttgatgatcagccccatcaccacttcttccagctcttcagcttccgtttgcgtatcgggaatgttatcgagatccatcatacatcgttcctctcttttcttaccggcacgattacccgtaccggcatcgattaaaatttcagggcgttagcgatatcttcttcgctctcttctttatcaatcgcattttgtgctttgttagccaccacaacaaagggcagataaattaacgttgcgatgccaaggttgaagagtgcgaccagcaatgcggcgacgctaccgttggtgttaaagaaggctcccagaccggttggcatggtccacggtgcaatattggtcaccggaggaataatgcccatgtagtacgctgcgagggtgattgccgccagaatcggttgtaccagtacaaacgggataaacatcaccgggttcatgataattggcagaccaaacagaatcggttcgttaatctggaagatgccggacggcagcgccagttttgccacctgacgataatcagcacggcgagaggcgataaagatagccaggatcaggcctaaagtcgcaccactgcccccaaggaaaataaaggagtccagcatcggcttggcccagatatggaaggtcttaccggctgccagcgccgcttcgacggaaccatattgctgataggtcgcgatattttccagtgcccacggcgtcataatgccgttgtccagtgcggtcagcgccagcgcgccatgaataccgaagaaccagagcagtggaacaaagatcacataggcccagcccaccacgctacccaagcttgccagtggggtactgatggtatccataatgatctgatggaagttggtgccccaggtattcaacgcccaggcaataatccccatcacggaaagaataataaagccgggaattaatgcgctgaaggaacggcttacactagcaggtacgctgtcgggcagtttaatgacccaattgcggcggacaataaaggtaaacatttctgccaccaccaggccaataataatcccggagatgatattcgccccacctaaccagtttgcaccaaccgcataggcctcaccgacactatatggggtgacggtcataaatgctgcaacggataacaacccagccgccagcgcatcgactttacgctcttctgccagcgccatgccaataaagaacggtgccattaaagacattattcctaatgttccgttatatacgttgccgccaatacctttcagaccattaagtgtttcaatggtactggcgtcgaggcgaatacctaaggaataaaaaaagctcccctccccaaagcttagaaaaacgttgttaattaatacaaacatggcccccgcaagggttaacggcattaagcgaataaagccatttttgattgcattaacgtgtggctgctttcctattttaactgcaaaagggaggagtaccttttcaaggcttgcaataacattactcatagaaaaatacccttaaaaaccgcaatttaaatattgcggtattgatttatgaaataactctttgacgggaaaatttaaaataaattaatttgctgcggcttttttaatcgctgcaaccgcagccttaagcacgcctaaaccatcgactttgccataaagcaggctgtcaattacttcaaccggtttgttgggtaacaaacgctggatttcgggcaacatataagcaatctgcggccctaataacacgacatcggcattctgacctttttcaccagccagtgtttccggaaatgcttcaataatgaccggaacttcatatttttctgcctgtgcgcgcattttacttaccagtaaagaggtagacatgcccgcagaacaaaacagataaatgtgtttcttttccataaaactgccctcatcgacgattatctgtcagccagacactccgcaagccttaacctgcttccatgctctgggtaacttgcgaaaccaacatgactttttttgtggctgaaaggagtatacggtatagacctgagcaatagtatttctttgaccttataaattgtttctccttgacctgtggttatgaccctcttcacatttcgggcaaataattcgcgaagataattaagaactcaggccaaaaaaaaccggcgcaatggccggtttccgttgttactcaagctttcagacgaattgattacttcgcagcctgtggatcagtgtcgtattcagcacaggtctgataaccggagttgatgacatatccggtatcatctaacgcgacaaagtaggtttctgctttaccatcacgttgacccaggatgtaggtctggcaagtaccgcgagcatggatcatgctcacttcagagctaggtttacccgcaatttgtgcaacctgcgcccggctcatgccttttttgacgtctttcaccacaggctgtacaaactggtctttggtacgatcataagccgtacaacccgccagcatggttaataccgccgctgcactcagaattcctgccatattcttgttcatattccgtcctcttgtttatcagcgtgttagataagcctggaatacattgggcgctttttcaagcccgtgaacgaaacggctccgctttcagaggattcctgtatgacgttttaaccaccattcagcccgctgtcgcttgtcgtttcagtagcaacgggttagctttaaggaagttttgtcttttctgtctggaggggttcaatgacattgcaacaacaaataataaaggcgctgggcgcaaaaccgcagattaatgctgaagaggaaattcgtcgtagtgtcgattttctgaaaagctacctgcaaacttatccgttcattaaaagtctggtgctcgggatcagcggcggtcaggactccacgcttgccggaaagctgtgccagatggcgattaatgagctgcgcctggaaaccggcaacgaaagtctgcaatttattgccgtacgcctgccctatggtgttcaggccgacgaacaagattgccaggatgccattgcctttattcaaccggatcgcgtattaaccgttaatatcaagggcgcggtattggccagcgaacaggcattgcgggaagcaggcattgaactgagcgattttgtccgtggcaatgaaaaagcgcgtgagcggatgaaagcacaatatagcattgcgggtatgaccagcggtgtcgtggtgggcaccgatcatgcagcagaagccattaccggattcttcactaaatatggtgacggcggtacggacattaatccgctgtatcgtctcaacaaacgtcagggtaaacagttactggcggcattagcttgcccggaacacctttataagaaagcgccaacggccgatctggaagatgatcgcccttctctgccagatgaagtggcactcggcgtgacctatgacaatatcgacgactatctggaagggaaaaacgtacctcaacaggtcgccagaacaatagagaactggtatctgaaaaccgaacataaacgccgtccgccaattaccgttttcgatgatttctggaaaaagtaataatttgcacatattggattgtgcgaaaaagagtaatttgttcacgccggatgcggcgtgaacgccttattcgacctataaaactatgcaaattcaatacattgcaggagtcgaataggcctgacaggcgtagcacgtcagacggtgtaacctttgtcatcgacccgcctcttttttaatcgcttcccgcctgttacactggatagataaccagcattcggagtcaacagtggtacggcgtttaacttctccgcggctcgaatttgaagctgcggcaatttatgaatatcccgaacatttacgtagtttccttaatgacttacccacccgaccaggggtgtatctgtttcatggtgaaagtgacaccatgccgctctatatcggcaaaagcgttaacatccgcagccgcgtcctttctcatttacgtaccccggatgaagccgccatgctacggcaatcccgacggatcagctggatatgtaccgccggtgaaatcggcgctctgctccttgaagcgcgattaatcaaagaacaacagccgctgtttaataaacggttgcgccgcaatcgccagctctgtgccctgcaattaaatgaaaagcgcgtcgatgtggtgtatgccaaagaggtggattttagtcgagcccccaacctgtttggcctgtttgccaataggcgcgcagctttgcaagcattgcagaccatcgctgatgaacaaaaactttgttatggcctgctgggactggaaccgttaagtcgcggtcgtgcatgttttcgtagtgcgctaaaacgttgcgccggagcatgctgcggtaaagagagccatgaggaacatgcgctacgcttgcgccagtctctggagcgtttgcgggtggtgtgttggccttggcaaggggcggtggcgctgaaagaacagcacccggaaatgactcaatatcatattattcaaaactggctgtggctgggggcggttaatagcctggaagaagcgacaacgttaattcggacacccgccgggtttgatcacgacggttataaaattctttgtaagccgctgctttccggtaactatgaaattactgaacttgatccggcgaatgaccagcgagccagttgattactgaacttgatccgggctatgaccagcgagccagttgatttcactgaacaacagtttaccttgcggttgtaaaagccgcagggtgtgcctgccatcgaaccagcacgcgccctggtcggtagtgagcaatttatcgcccagttgccacgccccgttaatcacaaacaccaccccgccgcgactgccaaaggtagtaaacgtacgttcggcaattctgactttcgccttacagacatccaggcgtgtcatgatgttgaaatccatgctcatctgccctgccgtcagtttcgcttttaccacctggtccgctgcaaaggcaaaaggctggaacggttttaaggtatggttaaagcggtctgcgctttcaaggagcatctcgccgccttccagcaacgtcactatcctttccatgccgggaaacaaagaaaactccccattcgccgcgatggatgcaatgctggcacgccagtaaaaatcacgttttgccggtgggaacgtgcaaatttcgcgcgtttcaccggcagcatttcgccacagattcacgctcattttacgcatatcaaagtattccatactcgctcccggcccgttcttttcattgttatcgttcaggtaaccgtggatggttatcggcaactcgggtgatttacgttagtggtgatcaggctttttttacaactgtttgagaagagaaaagaaaaccgccgatcctgtccaccgcattactgcaaggtagtggacaagaccggcggtcttaagttttttggctgaaagattattcagcagttgcaggcattttaccttttgccgctggacgttctgtcagacgcttctcaaaattagcattaaattgctttttctgttccggcgtcaggatgttgtaaattttgttctgggtttccatgtgcgccagcatgttagctttgcgctgttcttccatttttgcgatctgcgcttcagcttttactttatcgaaggtatcgctggcaatgatgtcatgcattgcgcggcgttcttccagcggcggacgtttcatctggtcacgctggcctttcatgatttcgcggatctgctgtttctgcgcgtcggtcaggttcaggtctttgaacatcatgtcctgatgcggaccgaacttgcctttgtggtgcatcatcggcttcgcgtcagccggtgctgcggtagtggtgtctgcggcatgggccaggttagccgcgccaagagccagggtagaggcaacaaacagtgcagttaatttacgcatattctatatccttcctttcagttatttattacggctttcttaagtagcgtgccgtgttgacgagattaactttactgactttagcgtcaattaatcagagcaacggtaaaacaatgaaagtgtaaaaaacacttttgcgccaattatggagaaaaaaagaaaatttgatggagagtgatgagagaatattacaacacgatgattttgcagagattatgaagaactataccggatgactggtgataaataaagcaaataaccaggattaatctgtattaatttataagaaagcaacttaatacccgcagaatgatttctgcgggtaagtattagcttattttttcgagcattaatcccgcgcgtaatcccaacgctaccaacggattagggaataacacatactctacatcatgggttacggtaaaacgttcctctccgtcctgcgccagcaatgttcctttctcaaacggcataaaattcagcgtgtcacttgccatatgcatttcgaaggacgggctgtggcgagtaatttggctaaccacccgataacggagcggcggtgttctcacgataccgacactctcaccagatagcagcgcagcaattgcgctggcagttactgcaaactggcgaagatcgttttgcccaaagggcaacgctttgccaagttccagcgtacaggccagcgcgccaaaatgtctggcgctgaaatgggtaaacgtaccaccaggttcctgatggaacaccagcgcctccagccccgccgcacccagccacgtcagaaatttctcgtcccagggaatgtcgcgttgcggtaatacaccgaactgcggatgcaaggagccacgaattgcggtatgtagatcaaggtgccagcgcacagattctttgccctggtcataaaaatcttccaggcactgttccagttcgcgcgcccgacaggtttctccgctttcagcaaatagctgccaacgaccgccaaacattcgattcatatcgctatggcaataacgtttcccttgcttcagcgcaggaggattcccgaggatcaccagcaaccgccaacgtaacgggatctcgccgtgagatatcgcgccaagcaacgcgtccagcatctccacaggtgccgtctcattaccgtgtattcccgcactaatcaccagtgcgccttgcggtggcgttaatggcgtcagttccagcacaccatcgcccagccagcgccagcgaacgccgttgatttctcgctcggtgataaccggttttttacccgttaaggtcagagcaagaaaattatccattgccccctccctcgcgctggaacggataaacgctaccgagattcagtaattggctcaatacatccagtgcttcccgcccttcgcgcagcaattgcgggtcggccagatcggcagcagtaaggcgatcgcggtagtaacgatccacccagtcattgagcgcattaaacagcgtatcgttcatcatcaccgccggattcaccgcccggcgttcttcttctgtcaataccacccgcaaccgcaggcacgccgggccgccgccattcgccatgctttcacgtaaatcaaagacttttagttcgctaatcgggttgtcagcggcaaggagttcattgagataaccccatactccggcgtgttcccgacactcctgaggcagcaccaacatcatggaaccatcatcgcggctcagcagttggctgttaaacagataggtagacaccgtatcagacacggaaacctgagttgccggaacttctatcgccataaaaccattgacccgcgcacgcaggtttgccagtaactgactctggcgagcgaacgcctgttggtggcaaaacagcacctggcggttactcacggcaatcacgtcattatgaaaaacgccctggtcgataacgtccgggttttgctgggcgaaaatcacctgttggggattcacctgattcagccttgccaccgcctcgctggcttcgcgagtctgtcgcgccggataacgggaaggccgggtatcattgccttcttctcgcccgtagacaaaaagttgcatacccggttcaccgtaatgaccgccgagacgattgtggtttgccgccccctcatcaccgagcaacgctacctgtggcaacgcgctatggacgctaaatttctcttcgtcgttaaaaatcgcttttaacaggctttcagtgacgggcgcttccaggctacggtgaaatttattgttcaggttggcaacggtgagatgcactttgccatccagcgtatcggcagatggcgcgatcgttgccgcattggctacccacattgggctagcggaactgacgctggaaagccagtgcggtgcctggcgtgcaactttttccagtacctgctcatcgctaccactgaatcccaactgacgcagcaccggaataaacggacgctcgtgcggcgggatcacggcctgggggaatcccgcatcggcaagggctttcattttcagtaagccctgcttcgccgccagtcgcgggttagacacctgaaaacggtgacgggtagaggcttcattaccaaagctcaggcccgcgtaatgatgcgtcagccctaccagcccgtcgaaattgacttcccaggcgttcatcgcaccacctcatcggaaaaatccagcccggggttaagcgtggcgggcaatgttaagctgtcgctctccaggctcgccatcggccatgcgcagtaatctgcggcataccaggcgctggggcgatggttaccggaagcaccaatgccgccgaatggcgcggtactggcagcaccggtaagcggtttgttccagttaacaatccccgcccgcgcctccagcaacagttgatcgaacttttcccgctcgggggaaaccagaccgcaagagagtccgaagcgagtgttattcgccattcgaatcgcttcatcgaaagtatcataacgccagacgcgcaataacggtccgaacacctcttcatctggtacgccagcaacgcctgtcatttcaatgatccccggcgtcagcaagcttgtccctgcttgtaataagcgcggcgcaagcaggggtcgtccgcccatcgcttccagttgctgccatgcagtaaccacctgctgtgcggcctgttcagaaatcagcccgccaataaacggctgcggttcgtcatcccagttgcccggcgttaatcgctggctgacggcaaccagacgagcaagaaacgcatcgccctgcgccccgcttttcagcaataaacggcgggcgcaggtgcagcgttgaccggctgtgacaaacgcgctctgaatggtcagatggacagccgcgtcgatatccgccacctcatcgataattagcggattattaccgcccatctcaagggcgagaattttctccggctgaccggagagctggcgatgcaactggtagcctgtattggcgctaccggtaaacagcaaaccgtcgagatcctccagcgcactcagcgcctgacccgtttcacgcccgccctgcaccaggttcagcacgcctggcggcaagccagcctgctgccataaacgcattaccgcttcgccactccacggtgtcagttcgctgggtttaaagataatggtgttacctgccagcaatgccggaacgatatgtccgttcggcaaatgaccagggaaattatacggcccaaacaccgccagcacgccgtgcgggcgatgtcgcaggctcgccgcgccgtccggcatttcactacgctgctcgccggtacgaacgtgatacgccttaatacttatcgcgattttattgatcatcgccgtcacttcggttgccgcttcccagcgcggcttacccgtttctctggcaataatcgcggttaattcggctttattgctttccagcagtgcggcaaagcgttcgacaacggcatgacgttcagcaaaactaagccgcgcccagcgcggaaacgccgcacgggctgcccgacaagcctgctcgacctgagcggcatcggcatcattgccttgccataacacctcgccgcttaccggattacgcttcacacggcttgcgccctggcccgttatccagtcaccgttaatccataaagtcatgctgttttctcctctgcgcacaggcgcaccagacgaacgcgatccccggcgtggcatttgagggcatccagttgtgcggcggttaaaatcaaacgctcggttgccggatcggtacgcaccagcaccacgcggaaatggtgataattttcattggcgaccaggcaggctgggaaatcgccctgcgcaggctgcccttctgccacttccaccagccgacttttacggatggcgcgcacgcggtcgatgtcacactcaagcgtcggcccaccgtcaaagatgtcgatatagttacggtagcgaaaaccttctttctccagcaccgcgcgggcaggcgcggtttgcggatgtacctgaccgatgacgtcctgggcttcctgggataaaaagtgggtatagatcggatgtttcggcatcagttctgcaataaatgccttttgcccggtgccgcagagaaaatcggcgcggctaaaatccatgctaaagaagcgtttaccgaggctttgccagaacggactatagccgtgttcgtcaatcaccccgcgcatttcagcaaccactttgtcattaaacttgtcgcgaaaagccgccataaacataaagcggcttttgctcagcaaatagccgttgccctctttgcgccagtccgggtcgagaaacagcgtgcacagctcgctgctgccggtgtgatcgttactgagaaacagcgtcggcaatgcgttatagacattcagctctttactggcgtgaaccaacgtgccgacgcgatagttgtaccagggatcgttcagcccaaccgccacctcaatggcacaaatccccgccacggtgcctgtctcgctatcttccagcacgaacacatagccctgctcacttttgggcagttcgccttgccaggttttgattgccctttcgatacgcgcgctaagcgtggcttcattggcgggaaggctcgtcaggccgccgcccgttttgctggcaagctgcatcagcgcgctgacatcacttcgctcaacgggacggatgaccatcatgatgaacctcggctaacaaattatttcaactactacctcggctaacaaagtgttcgcaagcagctgcaaagcgatccagtccggtcgtcacctcttcttcgctgacattgagcgcaggcgcaaaacgcaccacgttgccacccgcaatcagtaccatcacgcctgctttcgccgcttcctgagagatctgtttcgcttgcccggcgtaatcggcattcagtacacagccaatcagcaaacctaagccgcgaacttcactgaacaaaccatagcggtgattaatagtattaagacgctcaacaaaccagtcgtgacgctgtttaacgccattaagcatctctggtgtgttgatgagctccagcactttgcctgccaccgcgctggccagcggattaccgccataggtggtgccatgagtgccaacggtcatcacgcgggcgcactcttcggttgccaacaacgcaccgaccgggaaaccgccgcccagcgctttggcggtagttaacagatcaggcgtcacgccgtagtgcatataggcatacagttccccggtgcgcccgacgccggtttgtacttcatcaaaaatcaacagcgcattgtggcggttacacaattcacgcagaccttgtaaaaacgcgttgctggctggcaccacaccgccttccccctggatgggttcgacaatcaccgcacaggtagagtcgtcaatcagcgcgctggcagagttaatatcgttatatgcagcatgacgaatatccgccggcagtggcgcaaaatcctgactataggctggctgcccacccgcactgacagtaaacagcgtgcgaccatgaaacgcatttttgaacgccacgatgccgctcttatggctgccgtagcggtcgtgagcgaatttacgcgccagttttagcgccgcttcgttggcttccgcaccggagttacaaaagaagacgcgatcggcaaacgtggcgtcgatcaattttttcgccagtcgcagtaccggctcgttggtgtaaccgttgccggtatgccagaacttactcgcctgttcgttcagcgcttcacgcagttccggatgcgcatggcccagcgcgttcaccgcaatgccacccgcgaagtcgatatactctttcccctgctgatcccacaagcggctaccttcgccacgtaccggtataaagggtgccggagcgtaaacaggtatcatccattcatcaaagttttcacgcgtaattggctgagacatagcgacctctacagtaaataattcgttatttatatgttaataataagtaatgtttgcgctgtaaatgtagattgcagggttcgtgccagccagtgataaaagtgcataaacggcggaggctaactggaaatcaaggagttataaccaaaccatatgcatttaaagtgcatataaagtgaatacgtttgcgatgtgggtgaataaaaagaataaaaaacgcaatgttatgcagaagtaaaatataattctggaattgtgatcattgacgaaatttactggaaattactgcgccattctgacgcagcgcgcaccaaaagcgggcatttttttgcgccatcgttgacatcattaacaaccatcgatcaaatcacttaacaacaggcggtaagcaacgcgaaattctgctaccatccacgcactctttatctgaataaatggcagcgactatgaaatttgtctcttttaatatcaacggcctgcgcgccagacctcaccagcttgaagccatcgtcgaaaagcaccaaccggatgtgattggcctgcaggagacaaaagttcatgacgatatgtttccgctcgaagaggtggcgaagctcggctacaacgtgttttatcacgggcagaaaggccattatggcgtggcgctgctgaccaaagagacgccgattgccgtgcgtcgcggctttcccggtgacgacgaagaggcgcagcggcggattattatggcggaaatccccagtctgctgggtaatgtcaccgtgatcaacggttacttcccgcagggtgaaagccgcgaccatccgataaaattcccggcaaaagcgcagttttatcagaatctgcaaaactacctggaaaccgaactcaaacgtgataatccggtactgattatgggcgatatgaatatcagccctacagatctggatatcggcattggcgaagaaaaccgtaagcgctggctgcgtaccggtaaatgctctttcctgccggaagagcgcgaatggatggacaggctgatgagctgggggttggtcgataccttccgccatgcgaatccgcaaacagcagatcgtttcagttggtttgattaccgcagtaaaggttttgacgataaccgtggtctgcgcatcgacctgctgctcgccagccaaccgctggcagaatgttgcgtagaaaccggcatcgactatgaaatccgcagcatggaaaaaccgtccgatcacgcccccgtctgggcgaccttccgccgctaatttagcagctctcctggctcaaactgggtcaggagaattaaccttgagaaaaatcaacaaactgtcagtaatgatttgttgcctgccgtcctttgttataccgtctctgcgtttttagttgtctgaccacttctctattatcaagtttgatataggaaactccacgatgaacgctgagcgtaaatttctttttgcctgtcttatttttgcgctggtcatttacgctatccacgctttcggtttattcgatctgctcaccgatttaccccacttacagacactcatccgccagagcggatttttcggctatagcctctatattctgttattcatcattgccaccctcttgctgttaccaggaagcatactggtgatcgcgggaggaatagtttttggcccgctcttagggacactactcagtttaattgccgccacgctggcctccagctgcagtttcctgctggcgcgctggctgggacgtgatttactgctgaaatacgttggccatagcaataccttccaggccattgaaaaaggcattgcgcgtaacggtattgattttcttattctgacccgcttaatcccgttgtttccttacaatattcaaaattacgcttacggattaaccacaatcgccttctggccttatacccttattagcgcactcacgaccctacccggtattgttatttataccgtgatggcaagcgatctcgccaatgaaggcattacgctgcgctttattttacaactctgtctggcgggcctggcgctgtttattctcgtccagctcgcaaaactctacgcccgacacaaacatgtggatctgtctgctagccgccgcagcccacttactcacccaaaaaatgaaggataaaacgatgttgcaacattatagtgtgagttggaaaaaaggactggctgcactctgtttactggctgttgctgggcttagcggctgcgatcaacaagagaatgcggcggcaaaagtggaatacgacggacttagcaacagccaaccgctgcgtgtcgatgccaataaccatacggtaaccatgctggtgcaaattaatggtcgtttcctcaccgacgacactcgtcacggtattgtgtttaaagatggctccaacggacataaaagcctgtttatgggttatgcgaccccgaaagcattttatgaagccctgaaagaggcaggtggtacgccgggcgaaaacatgacgatggataataaagaaacgactcatgtcacaggcagcaaactggatattagcgtcaactggcaaggggcggcaaaagcgtattccttcgatgaagtgattgttgacagtaatggcaagaaactggacatgcgctttggcggtaatttaacggcagcagaagagaagaaaacgggttgcctggtgtgtctggatagctgcccggtcggcatcgtcagcaatgcaacatacacttatggtgcggttgaaaaacgtggtgaagttaaattcaaaggcaatgccagtgttctcccggcggataacacgctggcaacggttacctttaaaatcgccgaataaagccaggataaaggatgatgatgatgcaaagccgaaaaatctggtactaccgtataaccctcatcatcctgttgttcgctatgctgctggcatgggcgctgcttcccggcgtccatgagtttatcaatcgcagcgttgcggcgtttgccgccgtggaccaacagggtatagaacgctttattcagtcttacggcgcactggcggcagttgtcagcttcttgttgatgattttgcaggccattgctgcaccgctacctgcgtttttgatcacctttgccaatgcgagcctgtttggcgcgttctggggcggcttgctgagctggaccagtagcatggccggcgcggcgctgtgcttttttatcgccagagtgatgggccgcgaagtggtggaaaaattaaccggcaaaaccgtgcttgacagtatggacggctttttcactcgctacggcaaacacaccattctggtctgtcggttattgccttttgtccctttcgatccaatcagctatgctgccggtttgactagtatacgttttcgcagcttttttatcgccaccgggcttggtcagttaccggcaactattgtttattcctgggcgggcagcatgttaacaggcggtactttctggtttgtcaccggactgtttattctgtttgccctgaccgtggtgatttttatggcgaagaaaatatggcttgaacgccagaagaggaatgcctgatgggtttaccgccgcttagcaaaattcctttaattttacgtccacaggcgtggctgcatcgtcgccattacggcgaggtgctaagccccattcgctggtgggggcggatcccgtttatcttttatctggtgagcatgtttgttggctggctggagcgcaaacgcagtccgctcgatccggtagtacgaagccttgtcagcgcgcgcattgcgcaaatgtgcctgtgtgagttttgtgtggatatcaccagtatgaaagtcgccgagcgcaccggcagcagcgataaactgctggcagtggctgactggcggcaaagcccgctctttagcgatgaagaacggctggcgctggagtacgccgaagccgcaagcgtaacgccgccaacggtcgatgatgccctgcgtacccgactggctgcgcattttgacgctcaggcgctcaccgaactgacggcattgatcggcctgcaaaatctgagtgcccgttttaattctgccatggacattcccgctcaggggctgtgccgtattcctgaaaaacgttcttaaggagagatgatgcgccattgtgggtggttgctgggattgttaagcctgttttctctggcaacacatgccagtgactggcaagaaattaaaaatgaggccaaagggcaaaccgtctggtttaacgcctggggcggcgataccgcaattaaccgctatctcgactgggtgagcggcgagatgaaaacccattacgctataaacctgaagattgtccgtctggcggatgccgcagacgcggtgaagcgcattcagaccgaagccgcagccggacgtaaaacgggcggcagcgtggatctgctctgggtgaacggcgaaaacttccgcaccttaaaagaggccaatttattacaaacgggctgggcggagactctgcccaactggcgctatgtcgacacacagctgccggtgcgggaagatttttctgtgccgacacaaggtgcggaaagcccctggggcggcgcacaactgacgtttatcgcccgccgcgatgttacgccacagccaccacaaacgccgcaagccttactggagtttgctaaagccaatcccggcacggttacctatccgcgcccaccggactttaccggcacggcgtttcttgaacagttgctgattatgctgacgcccgatcccgccgcattaaaagaagcgccggacgatgcgactttcgcccgtgtcactgctcccttgtggcaatatcttgatgtgctgcatccgtatttgtggcgcgaaggaaaggatttcccgcctagtcccgcgcggatggatgctctgctgaaagccggcacattgcgcctgagcctgacctttaaccccgcgcatgcgcagcaaaaaatcgccagcggcgatttgcctgcaagcagttacagttttggctttcgcgaggggatgattggcaacgtgcatttcgtcaccattcctgccaacgcgaatgccagtgctgcggcgaaggtagttgccaatttcctgctcagtcccgatgcgcaactgcgtaaagcagatcccgctgtctggggcgatccttctgttctcgatccgcaaaaactgcctgacgggcagcgcgaaagtttgcaaagtagaatgccgcaggatctgccgccggtactggctgaaccgcacgcaggttgggtaaatgcgctggaacaagaatggctacaccgttacggtacgcattaatctttttgctgtgggcgatggtggcggtgatttatgcaccgctgatcccggcagctctcacgctgataagccctgctttgagcttgacacactggcaggcgttatttgccgatccacagttaccgcaggcattactggcaacgctggtgagcacaaccatcgcggcggtcggggcattgttgattgccctgctggtgattgtggcgctgtggcctgggccgaaatggcagcgtatgtgcgcccgtctgccgtggctgctcgccattccccatgtggcttttgccaccagcgcccttctgctctttgctgacggagggctgctttatgactatttcccgtatttcactccgccaatggaccgatttggcatcggtctgggcctcacccttgcagtgaaagaaagcgcatttctgctgtggatcttagcagcagtattgagcgaaaaatggctgttgcagcaggtcattgtgctggatagcctgggctacagccgctggcaatgcctgaactggctgctgttgccctccgtcgcgcctgcgctggcaatggcgatgctggcgattgttgcctggagcctgagcgtcgtggatgtggcaattattctcgggccaggtaatcccccgacgctggcggtaattagctggcagtggttaacccagggcgacattgaccaacaaacaaaaggcgcgcttgccagcctgctgttgatgctgttactcgccgcctacgttttgctgagctatctgctatggcgcagctggcggcgcactattccccgcgtagatggcgttcgcaagcctgccacgcctttattgccgggcaatacgctggcgatttttttacccttaaccggtgtgctgtgtgtggttctgctggcgatcctcgcggatcagagcacgatcaatagtgaagcgctcatcaacagcctgacaatggggctggtggcgacattcatcgctttgctcctgttactgctgtggctggaatgggggccacagcgtcgccagttgtggctatggttgcccattttattacctgctctgccactggtggcgggccagtacacgctggcgctatggctgaaactggatggaagctggacggcggtggtctgggggcatctgctgtgggtgatgccgtggatgctgtttatcctgcaacccgcctggcagcgcattgatagtcggttaattttgattgcgcaaacactgggctggagccgggccaaaatcttcttttacgtgaaatgcccactcatgttgcgccctgtgctgattgccttcgcggtgggatttgcagtcggtattgcgcagtatatgccaacgctgtggctgggcgcggggcgttttccgacgctcaccactgaggcggtggcattaagcagcggcggcagcaacggtattctcgccgcccaggctttatggcaactgctattaccgcttattatttttgccctgaccgcgttagtcgcaaaatgggtaggttatgtcagacaaggactccgctaatgctctgcgtgaaaaatgttagcctacgtttaccagaaagccgcttgctgacaaacgttaactttacggtggataaaggtgacattgtcacgttaatggggccgtctggctgtggaaaatccactctgtttagttggatgattggtgcactggccgaacagttttcttgtacaggtgagctatggctcaatgagcaacggattgacatcctacccaccgcacagcgtcagattggcattctttttcaggatgcactgttatttgaccagttcagtgtcgggcaaaatttactgctggcgctaccggcgacacttaaagggaatgcccgacgtaatgccgtgaatgatgcacttgagcgtagtggccttgagggagctttccatcaggatcctgccactttgtctggcggtcagcgagcgcgcgttgctctactacgcgcccttctcgcccaaccaaaagcgttactcctggatgagccattcagccgtcttgatgtggctctgcgcgataattttcgccagtgggtgttcagcgaagttcgcgccctggcgatccccgtcgttcaggtaacgcacgatctccaggatgttcctgctgatagttctgttctggatatggcgcagtggagtgaaaattacaacaaactgcgataacgcaaagtttttctcaatgcgtcagttcagaatggcgcactcaaaactacaatgtcgggattttcgatgaaacgtgtttctcaaatgaccgcgctggcaatggctttagggctggcttgcgcttctagctgggccgctgaactggcgaagcctcttacacttgaccagcttcaacaacaaaatggcaaagcgatagatactcgccccagcgcgttttataacggctggccacaaaccttaaatggcccttctggtcatgaacttgccgccttaaacctctctgccagctggcttgacaaaatgagcaccgaacagctcaacgcgtggatcaagcaacataacctgaaaaccgatgctccggtggcgctgtacggtaatgacaaagatgtcgacgccgtcaaaacgcgactgcaaaaagcaggtttaacgcatatctccatcctgagtgacgcgctaagcgaaccttcccgtctgcaaaaactgccgcattttgagcagctggtttatccgcaatggctgcacgacctgcaacaaggtaaagaggttacggcgaaacctgccggtgactggaaagtcattgaagcggcctggggcgctcctaagctttaccttatcagccatattcccggcgctgactacatcgataccaacgaagtggaaagtgaaccgctgtggaacaaagtttctgatgaacaactaaaagcgatgctggcaaaacacggcattcgccatgacaccacggtcattctgtatgggcgtgacgtatacgctgcagcgcgtgtggcgcagattatgctttatgctggtgtgaaagatgtgcgcctgctggatggcggctggcaaacctggtccgacgcgggactgcctgttgagcgcggaacgccaccgaaagtgaaagcggaaccggatttcggcgtgaagatcccggcacaaccgcagttgatgctcgatatggaacaggcccgtggactgctgcatcgccaggatgcaagcctggtgagcattcgtagctggccagaatttatcggtacgaccagcggttacagctatattaaaccaaaaggtgaaatagccggcgcacgttggggacacgctggtagcgacagcacgcatatggaagattttcataacccggatggcaccatgcgcagcgccgatgatattaccgctatgtggaaagcgtggaatatcaaaccagagcagcaagttagtttctactgcggcaccggctggcgcgcgtccgaaacctttatgtacgcacgcgccatgggttggaagaatgtttccgtgtatgacggcggctggtacgaatggagcagcgatccaaaaaatccggtagcaaccggtgaacgcggcccggacagtagcaaataacattgcaattactgacgctggaggctcttcagcgtcagatacccactccacacccgcgtaaaggtcgtcatccagcacaacgcaccgaagatccacgcaaaccacgcaaaccatgcagggaataaacatcccagcacaaacagtaagatcgtttctgtgccttcggttaatccccccagatagtaaaagctcttatgtgcataaccggggttatcaatctgatgttttgctgccagtgcagcaaaggcgagaaaactgctgcccgtgccgataaacgcaaacaacaaccagccgcctgccagcgcattttgctccggtgcagcaagaataaagccaaacggcaccagcgcgtaaaagagaaaatcgagagaaatatcaagaaagccgcccgcgtcggtaagctctctgcgccgcgccagcgcaccgtccagaccatcaagcagcctgttcaacaaaatgacgactagcgccgccagataccagcccagcgccagaaacggcagagccagcacgccgatggcaaatcccactaatgttaaaccatctggcgtaatgcccggtttatcaagaacccgcacgcactgatgcaacaacggtttaatccggggatgaagatggcggtctagcacaggcactccttaaatataaagcctttctgattgagcaacagtgcggatattatggcatttttcgcttatctgcccgtgtgtaatttatgaaaatgattgaagttgttgccgccatcattgaacgtgatggcaaaattttactcgcgcaacgccccgcccagagcgatcaggcgggattatgggagtttgccggtggtaaagtcgagccggatgaaagtcagcggcaggcgctggtgcgtgagttacgcgaagaactgggcatcgaagcaactgtgggtgaatatgttgccagccatcagcgagaagttagcgggcggattatccatcttcatgcctggcacgtacccgacttccacgggacgttacaggcacatgaacatcaggcgctggtctggtgcagtcctgaagaggcgctgcaatatccgctggcccctgctgacattccattattagaggcgtttatggctttacgcgccgccagaccagcggattaattatggctttacgcgccgccagaccagcggattagtgctaagggttttgtcatcacgctggcattgcagcagtattccttcggctttaattaccgccccttcagaataattttgatcctgataaacgcagcactgagtacagggctgcgcactctgcccgccactactgaacacttctggcggtacgtttacctccacgtccggacgataatgcgggttagccagtgcaattaatggaaatgctaatactacggcgaacaatgctcgactcacagggaactccttaacgttattgtctctgctactgataacggtagccgggtggcaaaactttagcgtctgagttatcgcatttggttatgagattactctcgttattaatttgctttcctgggtcatttttttcttgcttaccgtcacattcttgatggtatagtcgaaaactgcaaaagcacatgacataaacaacataagcacaatcgtattaatatataagggttttatatctatggatcagacatattctctggagagtttcctcaaccatgtccaaaagcgcgacccgaatcaaaccgagttcgcgcaagccgttcgtgaagtaatgaccacactctggccttttcttgaacaaaatccaaaatatcgccagatgagtttactggagcgtctggttgaaccggagcgcgtgatccagtttcgcgtggtatgggttgatgatcgcaaccagatacaggtcaaccgtgcatggcgtgtgcagttcagctctgccatcggcccgtacaaaggcggtatgcgcttccatccgagtgttaacctttccattctcaaattcctcggctttgaacaaaccttcaaaaatgccctgactactctgccgatgggcggtggtaaaggcggcagcgatttcgatccgaaaggaaaaagcgaaggtgaagtgatgcgtttttgccaggcgctgatgactgaactgtatcgccacctgggcgcggataccgacgttccggcaggtgatatcggggttggtggtcgtgaagtcggctttatggcggggatgatgaaaaagctctccaacaataccgcctgcgtcttcaccggtaagggccttagttttggcggcagtcttattcgcccggaagctaccggctacggtctggtttatttcacagaagcaatgctaaaacgccacggtatgggttttgaagggatgcgcgtttccgtttctggctccggcaacgtcgcccagtacgctatcgaaaaagcgatggaatttggtgctcgtgtgatcactgcgagtgactccagcggcactgtagttgatgaaagcggattcacgaaagagaaactggcacgtcttatcgaaatcaaagccagccgcgatggtcgagtggcagattacgccaaagaatttggtctggtctatctcgaaggccaacagccgtggtctctaccggttgatatcgccctgccttgcgccacccagaatgaactggatgttgacgccgcgcatcagcttatcgctaatggcgttaaagccgtcgccgaaggggcaaatatgccgaccaccatcgaagcgactgaactgttccagcaggcaggcgtactatttgcaccgggtaaagcggctaatgctggtggcgtcgctacaagcggcctggaaatggcacaaaacgctgcgcgcctgggctggaaagccgagaaagttgacgcacgtttgcatcacatcatgctggatatccaccatgcctgtgttgagcatggtggtgaaggtgagcaaaccaactacgtgcagggcgcgaacattgccggttttgtgaaggttgccgatgcgatgctggcgcagggtgtgatttaagttgtaaatgcctgatggcgctacgcttatcaggcctacaaatgggcacaattcattgcagttacgctctaatgtaggccgggcaagcgcagcgcccccggcaaaatttcaggcgtttaactgtatttaacggaacttgctccccacggaacatttcttatgggccaacggcatttcttactgtagtgctcccaaaactgcttgtcgtaacgataacacgcttcaagttcagcatccgttaactttctgcgatagcagcagatatgccagtaaagaaatcccatttgactatttttttgataatcttcttcgctttcgaacaactcgtgcgcctttcgagaagcaagcattatataatgccaggccagttcttcttcaattgtcccgttttgaaaagctgtgctacttatgctgatcatccaacttaattccgccgcccatattagcttcgcgctggatttaccggagctatgattagcgcaatcagagatatagtcactgggaaaaacagcaaatttattcaacaaggcgataacctgctctggggcttcctccatgtttgctttaaaggtattggctccatggtcgccagaaagaaaatgctccattaaggcacaataactttcgctatcttcgataccccattgatcctctaaagactcgcgtcttttacttatgatatcgatgctgtcaaaaggaagcacatgatattggaaggtatctttgccaggttcaggctttcgcggccagaactccagcgtttcagaccattgcttatgatagaatcgataaggtgcgatcaattgtagcgcctgtaacttctcgatactgagcggctcaatacctttagcctgataataatgcagttgttctttttttgctttaaaaccggcccgaacaataagccccatcataattaatagataaagaaaagagcatcccgcggtaatcaggcctctttcattcaaaccgttggatgttatcgctgcgaacacaaacattacagcgacaacacatgttaaataaaacccccacttacaaagcagcatggccttattttctttaatcatccgttcaaaattactattaaatatttcccagccattaaaagaatacttctcgctcccaggatggttttgtaataaaacttttttcatcacattccctgttattacatactttagaggcgataattttatccatgcaaaaaaaatatccaacgaattttcttgatccgctggatatttcagaatatgactcgaatagcacgaaagattcactcgcttacgctatcgccccgcttccgacttcatctgctggcggactttttttcgcactacgtttacgcggtgcagcctttttcttatcagcactgccaccactgcccggagccacaatgccgcgaaactgccgcaccggcgtacgtttggcttgatcaataagctgatatagcgtccccaccagcggctgcataaagtcctgatagcgacactgcttttcgctgatttgcgtcagcacgctttcccagtgcgcggtcatgtccggtcgcgtcgccatctccggcaggctatggaatagcgcttttccggcgtcggtggagtggatatagcgcccttttttggtcaggaaaccacgcttgaacaacagttcaataatcccggcacgcgttgcctctgtccccagaccatcggtcgcacggaggatctttttcagatctttatcctgcacaaagcgcgcgatcccggtcatcgcgctaagcagtgttgcatcggtaaaatggcgcggcggctgggtttgccgctctaccacttcacctttttcacacagcaactcatcgcctttcgccaccacaggcagtggcgtgccgtcgttttcttcatcgcgctctttgctgcctaacagcgtgcgccagcctgcttcagcaagaaaacgcgctttagcgacaaatttgcctttggcaatgtccagttcgataacacacttgcggaacaccgcatccgggcagaattgcatcagatactgacgggcaatcaggttatagaccttcgcttcgttctccgtcaggttgatcgcagaactccgtgcggtcggaatgatggcgtggtgcgcatcgacctttttgtcatcccaacagcggttgcgtatatctggatctaccactggctgcggcaacagatccggtgcatgaacactgatggcattcatcaccgcgtggcgtccggcaaaatgttcttctggcaaatagcgacaatcagaacgcggataagtgattagcttgtgcgtttcgtacagtttctggcagatatcaagcacgttctgcgcactcagaccaaaacgttttgccgcttcaatctgcaacgcactaaggctaaaaggcagcggcgcggattcactttcccgtttatcgttatagctggtgacaatagccggttgaccactaatgcggttaaccacatgctccgccagtggacgatgtaacaagcgcccttcttcatcctggtacggttcacacgcttcgctcggttgccagatagcggtaaaccgctcatcggcaggtgtcacgatatgtgctttgacttcaaagaagtctttcgccacgaagttttcaatctcttcatcgcggcgcaccaccagcccaagcacgggcgtctgcacgcgtcccacggaaagtacgccctgataaccggcattgcgaccgagaatggtatacgcacgggtcatattgatgccgtacagccagtcggcacgcgctcgcgccagcgcagaaacgcacagcggtacaaactcactgttggaacgaagacggtcgatcgcccgctcaaccgcctgcgggttcaggtcgtttatcaagcaacgctgtacctgctggcgcttttccggtgccagttgcagatagtccagcacttcatccaccagcaattgcccttcacgatccgggtccccggcgtgaacgatttcgctggcttcatgcaggaaccgtttgatgacgttaagttgtttggtcacggagggtcggggctgtaattgccacttttccgggacaatcggcaaatccgcaagattccagcgcgcatagcggctgtcgtaggcgtctggctgcgcctgctcaagcaggtgaccgatacaccaggtcaccacctgaccattaccgcactcgataaagccatcgcctttccggtgcggtttgggcaggacatcagcaatggcgcgcgccagactcggtttttcggcaataaacaaccgcattgaattaacgaatctcaaccatggcacgaccgccgcgcgctggcaccagttcgccaattgccgtcagttcaatgccaaactcggcggctgtagctttgacctcattttctgcttccggcatgaccgccagcagcaaaccgccagaagtttgcggatcacacagcagatcgcgcacttcacgcggcatttcacccatcagatgaccgtagctggcaaagttacgttcagtgccgccaggtactgcgcccaacttaatgtactcttcaacaccggggagtttcgggatcgcttcatagtcgacgcgtgcctgcacaccagccccctgacacatttcgctcaagtggcccagcagaccaaagcccgtaacgtcggtcatcgcttttacgccttcgatgttggcaaaggacgcgcctgcgatgttcatccggcacatcacttccgtcgccagtccctgatgttctggtttcaacagactttttttctcagccgtggtaagaacgccgatccccagcggtttcgtcaggaacagtttgcatccggcttgtgcggtactgtttttcttcacccgctcggtcggtacgatccccgttaccgccagaccaaaaatcggctccggcgcatcgatggagtgaccgccagccagcgcaatacccgcctgacgacatgcatagcgtccaccttcggtcacttcgcgggcaatttctggggaaagtttgttaatcggccagccgaggatcgcaatcgccataatcggtttgccccccatcgcgaagatatcgctgatggcgttagtcgccgcaatgcggccaaaatcgaaaggattatcaacgatcggcataaagaagtcggtggtactgataacgctggtgccattgcccagatcgtacaccgccgcatcgtcgcgggtttcattacccacaagcaaattcggatcaacaaacttcgcctgctcactatgcaggatggtttccaacacttttggggaaattttacagccgcaaccagctccgtggctgtattgggtcaaacgaatgctgttctcgctcatggacatctcctgtcaatgcaatccgggtatggtaaccctcattccgtgaagtgataagtgagagtgtctgaattcctgcgcctttgctcacaatccagacagtttcgcgacaattatcagaaataagttacaaacggcgtcgggtccgggacgttaatgctcgtagatgctttcagctgcggcgtaccgaggtagagaaaaccgacaattttatcctgctcacggcaaccgaatgcttcacgcactaccggactttcagttaatgcgccactgcgccagatgccgccaaacccctgggcaactgctgccatttgcatcgccatgaccgcgcatccggcagacatttcctgttcccagcgcgggactttatgattctcttcgcatttcgccaccaccgtgatgatgagcggtgcgcggaacggcgcattacgggctttgtcgatagctttgtcatcactaccggcagcaatcgccccctgttccagtacggcgctgaaacgctcgcgcccttccccttcaatcacaaaaaaatgccacggttgcatggacttatggtccggcgcacgcatacccgcacgcaggatgttttgcagttgttcacccgttggcgcgggttcagccaagcgggaggcgctacggcgattgatcaatagttcgagtgcatccatttgattaactcctgtcgtgatatttattcacaaaattaacacgagagtggattttgttacagcacagtccgcaattcctgctgacaagtaccggttgggtcattacgataaccacatctattgcgcctgtgacaggtgtgaccttaagttgggagaatacatgcgaaccctttggcgatttattgccggattttttaaatggacgtggcgtctgctgaatttcgtccgtgaaatggtacttaacctgttctttattttcctcgtactggttggtgtggggatttggatgcaggtcagtggtggtgatagcaaagaaacggccagtcgtggcgcactgctgctggacatttctggtgtgatcgtcgataaacccgacagttctcagcggtttagtaaattaagccgccagctgcttggtgccagttccgatcgtctgcaggaaaacagtctgtttgatatcgtcaacactattcgccaggcgaaggacgaccgcaatatcaccggtattgtgatggatctgaaaaacttcgcaggcggcgaccaaccgtctatgcagtacatcggcaaagctctgaaagagtttcgtgacagcgggaaaccggtttatgccgttggcgagaactacagccaggggcaatattatctcgccagtttcgccaataaaatttggctgtctccgcaaggcgtggttgatctgcacggctttgccaccaacggtctgtactacaaaagcttgctggataagctgaaagtttccacccatgtgttccgcgtgggtacgtataaatctgccgttgaaccgtttattcgtgatgatatgagtccggcagcccgcgaagctgacagccgctggattggtgagctgtggcaaaactatctgaatactgttgccgctaaccggcagatccctgctgagcaggtattccctggcgcgcaagggttgcttgagggtttaaccaaaaccggtggcgataccgcgaaatatgcactggaaaacaagctggtcgatgcactggcaagcagtgcggaaatcgaaaaagcactgaccaaagaattcggctggagtaagactgataaaaattatcgcgccatcagttattacgattacgcattgaaaacgccggcagataccggtgacagcatcggtgtcgtctttgctaatggcgcaattatggatggcgaggaaactcaggggaatgttggcggtgataccactgcggcacaaatccgcgacgctcgccttgacccgaaagtgaaagcgattgtcctgcgtgttaatagcccaggcggcagcgttaccgcgtctgaagtgattcgcgctgaactggcagcagcccgggcagcgggtaagcctgtggttgtaagcatgggcggcatggcggcatctggtggttactggatttccacgccagctaattacattgtggctaaccccagcaccctgaccggttctatcggtatcttcggcgtgatcaccaccgtagaaaatagtctggatagcattggtgttcatactgatggtgtcagtactagtccgctggcggatgtttctatcaccagggcactgccgccggaagcgcagctgatgatgcagttaagcattgagaatggctataaacgctttatcacgctggttgctgatgcgcgtcatagcacgccggagcagattgataaaattgcccagggccacgtctggaccggtcaggatgcaaaagctaacgggctggtcgatagtctcggggatttcgatgatgcggtcgccaaagcagcagagctggcaaaagtgaaacagtggcatctggaatattacgttgatgaaccgaccttcttcgacaaagtgatggacaacatgtctggttctgtccgggcaatgttgccagatgcgttccaggccatgttacctgcaccgctggccagcgtagcctctaccgttaaaagtgaaagtgacaagctggccgcgtttaatgacccacaaaaccgttatgcgttttgcctgacctgcgccaacatgcgttaagtcttgtactgagtggccgacagatcgtcggccacattattttttacgtcgacgaatcctcttcccgctgtttcgccccatatttccttatccgcatagtatcaggtgcgctccccctgcctcacgtatatacttttgctctttcgatatcattcatatcaatatcatgcaaaagaaaagtatttacgttgcctacacgggcgggaccatcgggatgcagcgttccgagcagggttatataccggtgagtggtcatctacaacgccaactggcgctgatgccggaattccatcgcccggagatgccagatttcaccattcatgaatatacgccgctgatggattctagtgatatgacgccggaagactggcagcatattgctgaagatattaaagcgcactatgacgactatgatggttttgtcattctgcacggcaccgacacgatggcgtataccgcctctgcgctgagcttcatgctcgagaatctcggtaaaccggtcattgtgacagggagtcaaatcccgctggctgagttacgctctgacggacaaattaatctgctgaatgcgttgtacgttgcggcgaattatccgatcaacgaagtaacgctctttttcaataaccgattgtatcgcggcaaccgcactaccaaagcccatgccgatggttttgatgcgtttgcctctccaaaccttcctccgttactggaagcaggtatccatattcgtcgtttgaatacgccacccgccccgcacggtgaaggggaattaatcgttcatccaatcaccccacaaccaattggcgtagtgacgatttatccagggatttctgctgacgtcgtgcgcaattttctgcgccaaccggtgaaagcattgattctgcgctcctatggcgtgggtaatgcgccacaaaacaaagccttcctgcaggaattacaagaagccagcgatcgcggtattgtggtggtcaacctgacacaatgtatgtccggtaaagtgaacatgggtggttatgccaccggtaacgccctcgcccatgccggcgtaattggcggtgcagatatgactgtagaagccacgctaaccaaactgcattacctgcttagccaggaactggatactgaaaccattcgcaaggccatgagccaaaacctgcgcggcgaactgacgccggatgattaaggagactgtaatgccccctcgcgccctgttactggtcgatttacaaaatgatttctgtgctggtggcgcgctcgccgtgccggaaggtgacagtacggtggatgtcgctaaccgcctgattgactggtgccagagccgcggtgaagcggttatcgccagtcaggactggcacccggcgaatcacggcagttttgccagtcagcacggtgtagagccttatacgccaggccaactcgacggtttgccacaaaccttctggccagatcactgtgtgcagaacagtgaaggcgcacaattacatccgttactgcaccaaaaagcgatcgcagcggtgttccataaaggcgaaaatcctttagttgacagttacagtgccttttttgataacggccgtcggcagaaaacctctctcgatgactggttacgcgatcatgaaatcgatgaattgatcgttatgggcctggctactgactattgcgtgaagtttaccgtgctggacgcgttacagttaggttataaggtaaacgtgattaccgatggttgtcgtggcgtgaatatccagccccaggacagtgcgcacgcgtttatggagatgagtgcagctggggcaacgctatatacgctggcagactgggaagagacacaggggtaattttacgctggcctacaattctgtactggcattgtaggccaaataaaacacgtcagtggcacatctggcaattgatgccatcaacgaaagatttaattcacctcagaaatctcttccaagctcaccttccgcgtttcgatgccaaaaatggagagaaccagcgcacagagcaataacataacaccaagtaccataaacaccgtgatgctcccataatgtgttaataatgccgcaacgccatagggcgtgaagactgcgacgatccgtccgacggcattaacgaaaccgctaccgcgcaggcgtaaatgcgttggccaaagctccgggatataaaccgcgctcgcgaagcaaacatacatgtataaaaagaagatcatcaccagtccatagattaaaatcgcccactctgtagtctgaatactatagatatagcctaacacggcaataataataagtaaggtggagccaaataaccgacgaggaaaatgatcaataattaatgccgcaataaatattcctaccggagcgccaatcataataacagcggtcattaatatacttttatcgacatcaatgccggagttaacaaatatggtcggtatccatacggtgatggtataaaggctaatgttcattgcaattaaaacagtaatcgcgactaatgtacgtcgtaacatttcacctttaaacaggagccagaaagtacccttgattactttaaccttgctgttgctctgatagctagtaagcgggggtaaacgaatactcttctctctttcaatttgctgctctacttcacgaagttggcattctgcacctgcgatttgccctttccctgccagccatcgtgggctctcgataaagtatttaccactgagaaaccaggctaacagtatgccaataccacccagcagaaacattattcgccaactaaaaaaagcgataaccaccacgcctatcgccgcagacagcatggggctccagttaccaacaaaactgagccgcgcggaccattttccacgcaccgtcgcggggataaactccgtaaaactggcatagccaaccataatcagcgcccccattcctgttcccatcaggaagcgaaagaagatgagccagtacatatcagggacaaaagcggcccctgttgcagcaataccgacgatgagaagatttatgcgaaacgccctgcgccgcccaaagtagtcaccaataaacccaccagtaagactgccgatgaaataaccaaacattaatgcgctggtaaaggcggcattgaggaaattattactccatccattgcttaccagctttgctaagacgacattaccggagtaactcaaaaaccctgttaataacagactaaagcttataataccaaatatacgataatgaaaccgggccaaaggcaagcggtccagtcttgcgccaatttgatcatattgttccattaggtgcctcggatttgctaaaaaggtagcaattgcggcaaattcacttgccgcatctttatcatcattttatttcaaggcgcaggaacaaataatattgacaacgtgtgcttaaattaccacaccagctggatattattgtctttgcaaaatgctatccactctgcacccggacttttatcagttattatgtaattaatatgactaaaatcagctaactggacaaaagctttgcgatcaaacttagagtgatcaaccaataacgcaacttctgtcgcctgacggatcattgtctttttgatttcagcttccgcttcattagagtccagcgcgccgctgttaatatcaagacctttacaactcattaccatgatatcgacatgatagcgcctgatgatctctttagtaattcttccttgcagactaagtgtatttttgtttagttccccacccgtactaacgactttaatttcactctgagccagaacatgaatcgcttccgcgctgttggttagcaacgtcaggccactacggtcctgtaacaatttgagcaattccattacggtactactggaatcggctgccatggtggttttattgtcgataaagggtagtgccttgcgtgcaataagctgcttctcttcataaaagctactagcgcgcttataaaaatggatattctccgtcaacatcgctgtatttaaaacagcaccaccataggttctggtcaaaaagccttcatcttccagcttctcaagatcgcggcgaatggtttcttcggttacctgaaaaatcccactcaaattactgactgtcacctttttatcgttggcaaccatttgcttaattgcctgaatcctgtcttttgccgccacgattacacccctgtatctttttacatcacattagcgcgattatcgcataaccgatgtttactttcaaaataacctgtttgaatcacagattttcatcacagttttcacagaaacagaggtgaatcgtgttgagtatttaacgctccagggcctctgccatttccctcatcaatgttgcgtctgcatcgcttaagttgatattcagtgccgcgacattttcgcgtacctgttccggtgcagtagccccactaagaatggagattaaatcactctgttttaatatccacgccagtgccagagtgggaattgtgcactgataacgagcacaaagtggctgccactgttcaagcatatcaatcactttcagcatgttttcacgctggaaccagactttatttgcccgagcgccgcccggaacgtaatcacgagtgatggtgccggtcaacaatccctgctctagcggggaataaacctgaaccacaatgccattatcacgacatagtggcagcagttcgttttccattgcccggtcgaggatactgtatttcgcctgaataatatccagttcaccatattgcagatactcgcggatatggtcagcatcgacgttagcagcgcctatagcgcgaattttcccttcagactttaactcattaagcactgcgacagtttcagcgatcggcgtaaaaaatggcggcacgctctgccagtgcgtcatgtagatatcgatgtaatcaatacccagacgttgcaagctcgctgctacctcttcgcggatagattccggggaaaggtttttatacaactgccgatcgccaactttgttgaataaacttccttttcgttcccagacaatgccgcatttggtttctactacaacctgttcacggggcagtttttttaacgcctgaccgacgataacttcactattgccaaagttatatcctggcgcagtatcaatcagattaatgccacaacgatgggcttcaagaatcgtatcaatacatatttgccgatcgagatcgccattccatgcaggaccgccgccaatggcccatgtccccaaccccattcggctaagcgtaatatccgttgtgcctaaaggtatctttttcatttgccttcattatccttcgtattcttccagcaattgttcgaccagctttctgttttttacgccggtggtggcaccgacgcttagaacgctgatagccgccgttgcattggcaaagcgtgcgcattcacgcagatttttgccttctaacagtgccgcaataaaaccactagcaaagttatcgcccgcgccaatggtgtcgatggcggttattcctgcgaccgccggcaccttcatcgtcatgtcaccacgcttgataaagcagccgtctttacccgttttaatcaccaccgtttttacgccgcacgcaagaaagcagtcagcaatttcatccagtgtctctttcccggtgagtaattttgcctcggcaaaattaggaaacagataatcgacataactcaatgcttcgcaaatatcatccagcgtttcattcaaccgcggtttgatcatatcggcacagataatcatctgccgggctttagcttgcgtaaaaatttctgttagcgctttaccatccaatagtggactgttgaaaatactggccagacttaataatttcgcctgagaaaaccgcgcaaaatcaacatcgtcaatattcaatttccacagactgccattacggtttgtgacaaacgtccgctcgccatcctccgtcaccagtccaacgttaatagaggtatctatgctgacgtcctgcttcaggctttgaatatcaatattctctttgcggcaatggtcgagaataaattgccctgcggcatctttaccaatacgactcattaatgctgtgcgatggcccagacgagaaataattgttgcttcatttattgcatcacccccggtggtcattgcgattctttcaagaggataagaatccacatcaaagatatttttactgaccggttgcaatggaatatcaacaatagcggcacctatacaaataacgtcgagattatccatatcattattccgctttgccatcagaaccgaacagtttaattttttccaatgcccgttcttttacagctttacgtacttcacgttctaaatgcaggaaaggctgatcctggttttctttcactgcaaccattgcggcctgacagagctccgtatgaatgttgattttcgcgatacccaagctaattgcagttttaatgtcggcatcactgatcccgcttgcaccgtgcaaaaccagcggaacagaaacggcatcgcgtacgcgtttgacgacctcaaagttcaattgtggctcactcgtataaaccccatgctggttgccgatggcgacagccaaactatcacagcccgtacgttcaacaaattcagccgcctggtcaggatcggtatagtgatagcccgccagcgcttcctcataaacggtttcattaccgacatgccctaattccgcctctaccggaatacccagcggatggaagaaatcgacagcctctttggttaaacgaatattttcttcgaaatcaaacgcggaagcatcacgcattaaactattcataccatgagtccaggcgttatgaataatctccatactccgaccatgatcccaatgagttattaccggcaccgttgctttttgtgccatacttaccatcatgtgagagaaatcttcaaaactggtgttaccgacaaaacctgtaccaaaagaaataataaccggggatttcgcttcttcggctgcgtcgataacgcccatcaacatttctgcattccatacgttaaaatgggcaattgcataatgtttatttgtggcatcgttttcccaatatctgatatctgcgagcatgttctgttctcccgtattaattaatcgctaattttaataacgcctttaataatgtcgcgtttgttgttaacactctcttcaaatgcctgttgtacatcccgataatcgtaaatatgcgtcaccatgcttttcacatcgaatcgcccactagaaatagcttcaatcgtgaccggataacgattggcatagcggaataccgtctggatagtgacttcgcgattgattttgaggaaattgattgcgctatcgccgggtacagtaccaacaatcataattttaccgccgcgcattaccagataaggtgcctgtttaacggtgaccgcagaacccgctgtttcgaaaacaatatctgcgcccatgtcttcggtaaattgctgacagcgtgcaatagtgtcttcttttgcgccgttaataaccactgtcgcaccaagctgttccgccattgccagacgtttttccagcacatcaacgacggcaatttccgttgctcccaggcatttgcacgcttgcaacgtcatcaaaccaatacaacctgctcccagaataattatcttcttacccggtttaacatctgccagcatcgcggcatgcatcccgactgcggcaggctccaccagcgccccttccatcgtgtccatattgtcgggcagtttgtaagtaaagctctccggatgacacagatagtgcgttaatgcgccgcggtagttgggttgtgtcgccataaaatcaacgtccgggcagatgttatatttgccttccagacagtaacgacagtgaccgcaaggaacgccaggttcgatatttacccgatcccccggtttaaatttgcgcacgcggcttcccacagccacaaccgtcccggcgcattcatgacccaggccaatttcttgatttgggtctttaggcggaataaacgggccactttcaaaaccatgtacatcactaccacaaataccgacatattctactttaatcaaaacttcatcttctttaggcactggtatttctgcactaataattttcattgtgcccggcacctgcaatattgctttactatttttcattttgaatccacccgtattatttattggctactgcatcaatacttaaactttcaacggagacacctttggtttcgattccaatggtggcgatagcaattgcgacaataatactaaccgcccccagaagaataaagactcccgtaacgccataactactgagcagcactgcaacggcataaggtgcggcaataccactgattcgccctaccgcattcgccagaccggagccacggagtttggcctctgtcggccagatttcagggacatacactgcgctggcatagcaaacgtacatatagacgaaagtaatcaggaagaaaccaatcaacgttatgagcaacatactggtttgcagactatagatatatccgagcaccgcaatcaggattaatagccccacacccattgttttacgcggaattttatccatcaccagcatggcaataaaaataccaaatggcgcgccaaacatactcatggtatttaaaacaatgctgtcttttaaattaatcccctgggtcatgaatattgttggcaaccagttaattagtgtgtactgcacaacgttcatggcaatcagcacacaagagcctaatatcacgcgtttcagtaatactcctgtcagtaaggcactatacggcaccgcttgtggcgctttaccgtcatcagcaataaccacaggcggcaaaggtttacccgtctggcgtatgacgccttcttctatactccgcatgactttctcggcttcctgataccgtccgcggctttccagccagcgcggggattcaggaaagtagcgccaggccagcgccgtagcgataaggctcaatattgcagggataagcagttgtacccgccagttccactctgcactaatcagcggcgtgagtcccatcgctatcaaactacagagcggataactccagttgccaataaaggaaacccgactactccacgttccacgatttctaccgggcatatattcggtgaaaccagcaaacagcgtaaccagtaaagctcccagcccaactcccatcacaaaacggcaggcaataaggaaatccatattcggactgaaagcaccgacaaccatgctggcaatatgaatggcctcatagaggatgaacgcatttctgcgaccggttttgtcgccaatgatgccgcccaccagcgcaccgagaaacattccggcggtcgtgattgcactgaatgtggctgtggtggaattatctgtccagcccaacgctttcagctgcgcgaggatcaagccaccaacggcattactccagcagacaagcaagccaaacgcgacgatggcaaacatactactatgccagcggcaatccggtaagcgatccagccgtgcaccacaatgcggttttgttatctgttccatgcgataacgttccttcaggagagtggttattcatcaaagtcgtaagtcatgatcactttgattgcggttttatcgaccatcgcatcaaacccttcgcgccattggctcaggccgatacgatgcgtgatcatcggtttgactttgatagcgccgctggctaatagcctgatagcgttacgccaactggtggagtcataggccatatgcccaatgatgcttttgttccaggcggtaatgtcattaatgctgaaatcaagaggtttgaagcccattccaacgcgtaccacttccccgttcgggcggagcatttcgatggcttgtttcagtgcgatattggcaccggagcattcaatcaccagtcccagattgtctttgccacaaatttgctggcagcgcgccaccacatcttcggtagaaccatttactactgccgtcgcacccagttcttttgcaaccgggaagcggaccgccacatcttcttgcagaccaacgacgacgatatttaccgcccccataattcgcgccatttgtacggagaacagcccgagtgggccagtgccgatgacgaccacatcctgaccaggaaggaatttgctttgctgcgcgatggatttgtaggcattacagatagggtcaagtacggctgcgtcctcataatcaacaccatcagggatttcccacaacgcatgacgatgaattttgagaatttcaccaggaaccagacaatatttggaaaaaccaccgccccaggtattattatccagaccaaggtttactttttctgtacaacacagaaaatcaccttgttcacaggccggacaaacaccgcaaacgtgaccgctgttatcgcttacgacgcgttgccccactttccagtctttgactttttcaccaacctgcgcaatacaacctgcgaactcatggccgcggatagagttaaactcatcagaaccgctatcgacattgtagtgcttcatgtctgcgccgcagattgccgcggctttaatttcaatcactacatcttccgggccacacatgggttgtgggacatcaatcatcttgtagccgccaaaggccttgccaaaccgagccagtgctttcattgcgtcatcctctgtgtttagttttgcttagatggccatcatacttacccacatgatttttgaggtcaacattaaatctgtaaaacacagataatgatctgcgttttacaactcagatcacaattacgcagaaaatggctgggtctgttacaggttgatggaaggcggggcgcaaaaagagcaaattcgagagggattaccggccaaataggtctgagacttaagttcaggagaagtcattcaggtgtgaacgggacggcaagagatcggactgggacttagccaggtcatggcgagataattgagatgagtcgtggggtcattgttggctatccccttcatagccgaggcaaaaaggggatgaaccacttacttaaacatggcaataggctttgcactgataccaaaatcttcttttaactgctgtttgctcttcatgaccatctgaccatttgtgtcaattgtcatatgctgtgcttcgatattatggcgggcttgccacagcatcaccagttgcaggcagttctctttttgttcctcggtcaacgcaacgccatcaggccatttccccagttcaacggcggtgctcaaacgctggtatacctcaggcatcatgctgttgataatgtcatcaagattcataatttttccgctcctgtggaataagttgctgaatcgttttttcaaccgttgatttcttcgccgttttcgccatcggtaaagcgtaaagaggcagagttaacacaataacgttcgcccgttggctgcggcccgtcggggaagacatgccccagatgggcatcacagttaccgcaacgaatttctatgcgctgcattccatgactcaagtctttgatataacgaatggattcttcacttaccggttcgtagaaactgggccagccacagccggaatcatacttggtttgggaatgaaacagcggggcatcgcagatcaaacagtgatatacgccgtcacgcttgttatgcagtaaacgacccgtaaatggcggctctgtcccatgattctgcgtcacgtaaaactgcatctcggacaaattttttttcagttcttctgcgctaggtttattagccatttgctcacatctcactttaatcgtgctcacattacgtgactgattctaacaaaacattaacaccaactggcaaaattttgtcctaaacttgatctcgacgaaatggctgcacctaaatcgtgatgaaaatcacatttttatcgtaattgccctttaaaattcggggcgccgaccccatgtggtctcaagcccaaaggaagagtgaggcgagtcagtcgcgtaatgcttaggcacaggattgatttgtcgcaatgattgacacgattccgcttgacgctgcgtaaggtttttgtaattttacaggcaaccttttattcactaacaaatagctggtggaatatatgactatcaaagtaggtatcaacggttttggccgtatcggtcgcattgttttccgtgctgctcagaaacgttctgacatcgagatcgttgcaatcaacgacctgttagacgctgattacatggcatacatgctgaaatatgactccactcacggccgtttcgacggtaccgttgaagtgaaagacggtcatctgatcgttaacggtaaaaaaatccgtgttaccgctgaacgtgatccggctaacctgaaatgggacgaagttggtgttgacgttgtcgctgaagcaactggtctgttcctgactgacgaaactgctcgtaaacacatcaccgctggtgcgaagaaagtggttatgactggtccgtctaaagacaacactccgatgttcgttaaaggcgctaacttcgacaaatatgctggccaggacatcgtttccaacgcttcctgcaccaccaactgcctggctccgctggctaaagttatcaacgataacttcggcatcatcgaaggtctgatgaccaccgttcacgctactaccgctactcagaaaaccgttgatggcccgtctcacaaagactggcgcggcggccgcggcgcttcccagaacatcatcccgtcctctaccggtgctgctaaagctgtaggtaaagtactgccagaactgaatggcaaactgactggtatggcgttccgcgttccgaccccgaacgtatctgtagttgacctgaccgttcgtctggaaaaagctgcaacttacgagcagatcaaagctgccgttaaagctgctgctgaaggcgaaatgaaaggcgttctgggctacaccgaagatgacgtagtatctaccgatttcaacggcgaagtttgcacttccgtgttcgatgctaaagctggtatcgctctgaacgacaacttcgtgaaactggtatcctggtacgacaacgaaaccggttactccaacaaagttctggacctgatcgctcacatctccaaataagttgagatgacactgtgatctaaaaagagcgacttcggtcgctcttttttttacctgataaaatgaagttaaaggactgcgtcatgattaagaaaatttttgcccttccggtcatcgaacaaatctcccctgtcctctcccgtcgtaaactggatgaactggacctcattgtggtcgatcatccccaggtaaaagcctcttttgcattacagggcgcacaccttctcagctggaaacctgcgggtgaagaagaagttctgtggttgagcaacaacacaccgttcaaaaatggcgtcgctattcgcggtggcgtaccggtttgctggccgtggtttggtccggcggcacaacaaggtctgcctgcgcacggttttgcccgcaacctgccgtggacgctgaaaagtcatcatgaagatgctgatggcgtagcgctgacttttgaattgacgcaaagcgaagagacgaaaaaattctggccgcacgactttacgctgttagcgcatttccgcgtgggtaaaacttgtgaaatcgatcttgaaagtcatggcgaatttgaaaccacctctgccctgcatacctactttaacgtgggtgatatcgctaaggtaagcgtcagtgggctgggcgatcgcttcattgataaagtgaatgacgcgaaagaaaatgtactgaccgatggtattcagaccttccctgaccgtaccgatcgcgtgtatctgaatccacaagattgcagcgtgattaatgatgaagcgctgaatcgtattatcgccgtaggccaccagcatcatctgaacgttgtcggctggaacccgggaccggcgcttagtattagcatgggcgatatgccggatgatggctacaaaacatttgtttgtgtagaaacggcttacgctagtgaaacgcaaaaagtgaccaaagagaaacctgcacatctggcgcaatccattcgcgttgcgaaacgttaatttacgttaatgttgtgtgccgggtgcaatgcatccggcacacaacatcacaccatatccagcgcagtttttccttttggtgccggatatgccttatccagcatagctaattccgcactagaaagttcgacctcaagcacagccgcattttgttggacatgggcaatcgtggccgcttttggaatcgccatcacaccctgatgactgatcacccacgccaacaatacttgtgccgcgctgatattgtgagcatgtgcaatttcgttgactaccgcgttttttaacagtccattgcgcaaccgcccggcctgggctaacggactgtaagccatcaccggcatctgctgttgctggcaccaggggagtagatcgtactcaattcctcgactaccgagatggtaaagcacctgattagtggcacactgatttccccccggcagctgccagagttcctgcatatcagcataatcaaggttagaaacgccccagcggcggatttttccctgggcgatcaatttttccatcgctgcgacagtctcttcaaaagcgaaactgccagaccagtgtaataagtaaagatcgagataatcagtattgagacggcgtaaactggcttcgcatgcatttatcgctttttgcccgccagcattccacggatagactttagagacgagaaagaccttctctcgcagaccggttaatgcttccccaaccaccttttcggcaccgccatcggcatacatttcggcggtatcaatgagggttaaaccgagttcaatgcccgcgcgtagtgcagcaacttctgttttgcgctgactggcatcttcgcccatataccatgttccctgccctacggctggcagactgacatcgccactaaattgaatcattttttgttgcattgtttcctcccaggtattgcaccaccgtaatgcaaaacagggcgtgacgccctgtttttatgcacaaaatgccctggaaagatgcattatcagaatttgtaggtgatcccggtagaaatcaggccagtccaggatttatccaccatcgggctgtcagtaacttcatcagacagacgggtgtagcgtgcggtaccgtaaacactccagtcgccgaggaagttgtagctggcgctcagctccaggtaagggctccagctgtcgttcgggttatagccacgcagaccgctgcgagcggactctttgcggcttacgccataatagtattcgttctggttttcgctgttccactgcacaccaatacccggagtcacggtcaggccaccgttggtgtaacgatacaaccaggccatatcccagacgatgccgttgctgttatccagggtatcgccagccagggtggtacgcaggtaaccgtactgggtaaagtgagcataagacagaccagccatcatggtgctcttacggtcatccaggtgacgcatttggtgatcgccactgtctttcgctttgaagtaaagcgggctccagtaagcggtaatactaagtttatccgttgcgtcattccacaggtagtaaccaccacctaagccacggaaccagaagttatcgccttcatagttgattaccggtactgggtaaacatcggtatcgtaatctttatatgggtgttcaacgacacctacgcctgcgcccagggaaaatttaccttcagcgtgcgctacgcctgcagacgttgcgataagcactccaagtgccagaagtttgagtttggtcacaattaatcattccttaaacaaatgtttagcgggcgacaaagtttacccgtcaatacatcgaaacccaacctttttacgttttcattttttaaagtaactgtttaattttcctgacgcggatgacaccgcgcttacagccaaatgaatttagcgttactggcgagcctggtctttacattaattatgcaaaatttatggatgagttgttgatatgccattgaaattaagaaagccgtgcaggcaagttttccatttgccatctacgcttaattttgaaggtgtatcaccgggcacgttgttctcatcgtcgataaaatggcatgagagttgctgtgttttagcaagagacgtcgttcagtttacctcttccgggagcctctactattcatatgaacggctcttaacctgtgctaaaaaacgaaaggacggcataccatgaatatattcgatcactatcgccagcgatatgaagctgccaaggacgaagagttcacactgcaggagtttcttaccacttgtcggcaagatcgcagtgcttatgccaacgcggctgagcggctattgatggctatcggtgagcctgtcatggtcgatacagcccaggaacccagactttctcgactcttttctaaccgggtcattgcacgttatccggcgtttgaagagttttacggcatggaagacgcgattgaacagattgtctcttatctgaaacacgcggctcaggggctggaagagaagaaacaaatcctgtatctgctggggcctgtgggtgggggtaaaagtagccttgctgagcgactgaaaagtttaatgcagctcgtaccgatttatgtattgagcgcgaacggtgagcgtagcccggtcaacgatcatccgttctgtcttttcaatccgcaggaagatgcgcagattctggaaaaagagtatggcattcctcgccgttatctcggcaccatcatgagcccgtgggcggcaaaacgcctgcatgaatttggtggcgatatcactaagttccgggtagtgaaggtctggccgagtattctgcaacaaattgctatcgccaaaacggaacccggcgatgagaacaaccaggacatctccgcgctggttgggaaagtcgatattcgtaaactcgaacactacgcgcagaatgacccggacgcctacggctattccggtgcgctgtgccgcgccaatcaggggatcatggaattcgttgagatgtttaaagcaccgattaaagtgctgcatcccttgttaaccgccactcaggaaggtaactacaacgggacggaaggtatctccgccctgccgttcaacgggattattctcgcacacagcaacgagtccgaatgggtcactttccgtaataacaaaaacaacgaagccttcctcgatcgtgtttacatcgtgaaggtgccgtattgcttgcgcatttccgaagagatcaaaatctacgagaaattgcttaatcacagtgaattgactcacgccccatgcgcccctggcacgctcgaaacactgagtcgtttttccattcttagccgcctgaaagagccagaaaactccagcatttatagtaagatgcgggtttatgatggcgaaagtctgaaagacaccgatcccaaagccaagagctatcaggaatatcgtgactacgccggtgtcgatgaagggatgaacggtctgagcacgcgttttgcgtttaagatcctctcccgcgtgttcaacttcgatcatgtagaagtggcagcaaacccggtccatctgttctacgtcctggaacagcagattgagcgcgagcagttcccacaagagcaggcagaacgctatctggagttcctgaaaggttatctgatcccgaaatatgccgagtttatcggcaaagagatccagacggcctaccttgaatcctattccgaatatgggcaaaacattttcgaccgttatgttacctacgcggatttctggattcaggatcaggagtatcgcgatccggataccgggcagctgtttgaccgcgagtctcttaacgccgagctggagaaaatcgagaaaccggcggggatcagtaatccaaaagatttccgcaacgagattgttaacttcgtactgcgcgccagagcgaataacagcggacgcaatccgaactggaccagctatgaaaaactgcgcacggtcatcgagaagaaaatgttctccaataccgaggagctgttgccggttatcagctttaacgccaaaacgagtaccgacgagcagaagaaacacgacgactttgtcgaccgtatgatggaaaaaggctacacccgtaaacaggtgcgtttactgtgcgaatggtatttgcgcgtacgtaaaagctcttaacaaccctggcccggtacacatgttaccgggcctacaacgacagcgaaccgtgggcctgagaagcggcaacacaggcgtagcatacagttggcaaatgtagtacggggggcatatgacctggtttattgaccggcgtctgaacggcaaaaacaaaagcatggtgaatcgccagcgttttttacgccgttataaagcgcaaattaaacagagcatctccgaggccattaataagcgtagcgtgactgacgtcgacagcggcgaatccgtatccattcccacggaagatattagcgaaccgatgtttcatcaggggcgtggcggtctgcgccaccgcgtgcatccgggcaatgaccatttcgtccagaacgaccgaattgaacgtccccagggtggcggcggaggttccggcagtggtcagggccaggccagccaggatggtgaaggtcaggatgaatttgtctttcagattagcaaagatgagtatcttgatctgctctttgaagatttggccttaccgaatctgaaacaaaaccaacaacgccagctgaccgaatataaaacgcatcgggcgggttataccgctaacggcgttccggccaatatcagcgttgtgcgtagtttgcagaacagtctggcgcgacgcacagccatgacggcaggcaagcggcgggaacttcatgcactggaagagaatttggccatcatcagcaacagtgaacctgcgcaactgctggaagaggaacgtctgcgcaaagaaattgcagaattacgtgccaaaattgaacgcgtcccttttattgacaccttcgatttacgttacaagaactacgagaagcggcccgatccctccagccaggcagtgatgttttgcctgatggacgtttccggtagtatggatcaatccactaaagatatggctaagcgtttttatattctgctgtatctgttcctcagcagaacgtataagaacgtggaagtcgtatacatccgccatcatacccaggcgaaagaagtcgatgaacatgagtttttctacagccaggaaacaggcggcaccattgtttccagcgccctgaaactgatggatgaggtagtgaaagagcgttataacccggcacagtggaatatttacgctgcacaagcaagcgacggcgataactgggccgatgactctccgctttgccatgaaatcctggcgaaaaaattattacctgttgttcgttattacagctatatcgaaattacccgtcgtgcacatcagacattgtggcgagaatatgagcatctgcaatctactttcgacaactttgcgatgcagcacatccgcgaccaggatgatatttatccggtgttccgtgaactgtttcataaacaaaatgcaacagctaaaggctaaaactatcagccaggtcattatcgcctggctgatttttagcttactgtaaattatctcatttattacatacattagcttacaatcgctttaaatatgacagcataacctttacataatttagttccagaaaacaatcattcggaaaaatgattcagagtacacgtatttccatggggttattctttaaatattttttaagcttaacgaaaattgatcctggtcaaaactatatatctctgccaagtataaaatccagcactcacattgctctcctttttatggtttctatgggtacacaaaaattaaaagctcaaagcttttttattttcagtttattgctgacgttaattttattttgcattactaccttatataacgaaaacacaaatgtaaaactcatcccacagatgaattacctgatggttgttgtggctttgtttttccttaacgccgtcatttttcttttcatgttaatgaaatatttcactaacaaacaaattttaccaacactcattttaagccttgcatttttaagtggccttatctatttagttgaaaccattgtaattatccataaaccaattaacggcagtacactgatccagacaaagagcaatgatgtttctattttctatattttccgccaactcagttttatttgtttaaccagcctggcgctcttttgttatggaaaagacaacatccttgacaacaataagaaaaaaacgggaatcctgttgctggcgctgatcccttttttagtttttccccttctggcacacaatctgagcagttataacgctgactattctttgtatgtcgtcgattactgtccggacaaccatactgcgacctggggaatcaactatacaaaaatattggtttgtctgtgggcatttttactgttctttattatcatgcgcacacgattagccagcgaactatggccgttaatagcattattatgtctggcaagcctatgctgcaacttacttctactgactctggatgagtataattatactatctggtatatcagtcgcgggattgaagtttccagtaaactgtttgttgtgtcttttctgatttataacattttcaggagctgcaactctccagcaaactggcagttcatgatgtgctgaccaatatttataatcggcgctactttttcaacagcgtagagagtttattgagccgacctgttgttaaggacttctgtgtcatgctggttgatattaatcagttcaaacgcatcaatgcccaatggggacatcgtgtgggtgataaagtgctggttagtattgtcgatattatccagcaaagcatccgccccgatgatattttagcgcgactggagggtgaggtgtttggcttgctatttaccgaactcaatagtgcccaggcaaaaatcattgcggaacgtatgcgtaaaaatgtcgaactcctgaccggctttagtaacagatatgatgttcctgaacaaatgaccatcagtattggcacggtttttagtacgggtgacacgcgtaatatcagccttgtcatgacggaagcagataaagccttacgcgaagcgaaaagcgaggggggcaacaaagtgattattcatcatatttaagtgcaaaaatattcagagccatgctttttgcgtggcttttgcatacaatttattactattacccctaaatttcccctccccagcggcgcagagatgagtataattagcgcccctgtgccaggccgcaatcgaactttatctggttttctcgtttcactaaccgaaggagatgcgtataaagcttccgatgagcgtttatatgtcaataagcagaacaaaaacagccgttcatgataaccttctgtggttgtttgcttgtaatctcaggagcgtgaaatgactgaaatggctaaaggaagcgtgacgcatcagcggttaatcgctttattaagtcaagaaggtgctgacttccgcgtcgttacccatgaagcggtaggtaaatgtgaagcggtgagtgaaattcgtggcaccgctctaggccagggtgctaaggcactggtatgtaaagtcaaaggcaatggcgtaaatcaacatgttctggcgatcctcgcagccgatcaacaggccgatctgagccaactcgccagccatataggcggattacgcgctagcttggccagcccggcggaagtcgatgaactcacaggctgtgtcttcggcgcgatcccccctttcagcttccatccaaaactcaaactggttgccgaccctctactcttcgaacgatttgatgaaatcgccttcaatgcaggcatgctggataaatccgttattttgaaaaccgcggattatttgcgcattgcgcaaccagaactggtcaatttccgccgcactgcgtaattagccggtccgttcgataagaagaacggacaaaaccagtacaacagcaatggcaaaaaagctactcgtgataatcagtgtctcgacaaacatttgatcgttcatagcatgcccccgggagatagctgttttcacgttattgttagcgtgcacaaatggcagtttgatgacagttcgcctgattttttatgcaaaaaacgtaaagattttctacttccttcctgcagcaagcgtaaagtaagcaggcttattattttttggcaaggaaaccacgatgtttgatgtcactttgctgatcctgctcgggttagctgcgctgggctttatcagtcataacaccactgtcgccgttagtattctggtgttaatcattgtccgcgtcacaccgttaagcaccttttttccgtggattgaaaaacaggggctaagtatcgggataatcattctgacgattggcgttatggcccccatcgccagcgggacgctaccgcccagtaccttgattcacagctttctgaactggaaaagtctggtggcgattgcagtaggcgtgattgtctcctggctgggtgggcgcggcgtgacgttaatgggcagccagccgcaactggtcgccgggctgctggtaggcactgttttaggcgtagcgctgtttcgcggcgtaccggttgggccgcttattgccgcgggtctggttagcctgattgtggggaaacagtaattattgccgcgggtctggtttcgcactttgtggggaaacagtagttaatctcgcaatatatcggcctggcgtttgccccaggcctttcttaaacatagtaataaaggccgttgtactatcataccccagcgtatgagcaactttctgtacagtatcgcctttcactaatccctgaagcgccataatcagctgtaactgctgacgccactggcgaaaactcaaccccgtctcttttactatcagtcgggcaagattgcgttcactcatcgcaaaaaagccagcccattgccccaatgccccccactcgacaggccctttcgccatcatctccaccatcgtgcggattttaggatgagaagaaacgggcaggtgcagctgttgttgtggctgctgagggagttcatcaaacaggacctgaattaatctgcgggtcattggctcagcacgctgagtcgtcgtcctgtttgccagggttaaaattaattcccggcataaggggcttattttcaatgtgcaacatgttgtcggcattgtcactgcgctgggttcgataaacagaaaacagagttcagcattagctgttacttgattgctatgttccaccccgcccggtatccaaaccgcatattgtggcggcaccatccacaaagcattttccaccgtacaggtaattgcaccatgtagcgccagtatcagctgtcctttgcggtgctgatgtacaggactggttaactcatccgttccggcgtgaatacaaaatgcgaccgcggcttcatggtgtcggtcgggttcatagccattgagattcaacctgtgcatcattttgtccgaacttagcgataatttgtcattttagcttgattcaacataacaataaaaacggtaaggtacagcctcgtttgtaacaatgagaagcatatgacctgtagtactagtttaagcggcaaaaacaggattgtccttatcgctggcattctgatgattgccacaacattacgcgtcacctttaccggcgcagcaccgttactggatacgattcgttccgcttacagcctgacgacagcgcaaaccggcttattgaccaccctgccattattggcctttgcgctaatcagtcctttggctgccccggtagcgcgacgttttggtatggaacgtagcctgtttgccgcgttacttttgatctgtgctggtatcgcaattcgctctctccctagcccttacttattatttggcggtacagcggtcattggcggtgggattgcattaggcaatgtcttactgccaggattaattaaacgcgatttccctcattccgtcgccagacttaccggcgcatattccctgacaatgggagctgcagcggcactgggaagcgctatggtcgtgccgctggctttgaacggttttggctggcaaggcgcgttgctcatgctgatgtgttttcctctgctggctctttttttatggctgccacagtggcgaagtcaacaacatgcaaatttgagtaccagccgcgccttacatactcggggtatctggcgtagtccgcttgcctggcaggtcacattgtttcttgggatcaacagtctggtctattacgtgattattggctggcttccggcgatcctcatcagtcacggctatagcgaagcacaggcgggtagtctgcatggtttgctgcaactagccacagcagcacccggtttgctgatcccacttttcttacatcatgtgaaagatcagcgtggtattgcagcgttcgttgccttgatgtgcgcagtgggcgcggttgggctctgctttatgccagcgcacgcgatcacctggactctgcttttcggttttggttccggcgcaacaatgatactggggttgacgttcattggtctgcgggctagttctgcgcatcaggcggcggcactcagcgggatggcacaatccgtcgggtatttgttggcagcctgtgggccgccgctgatgggtaaaatacacgatgctaacggtaactggtctgtaccacttatgggtgttgccatacttagtctactgatggcgattttcggactttgcgccgggagagacaaagaaattcgctaatatccggtgctatagtgacgtaacaaatcatgcgtgaaagggagaacaaacacgatgaatattcagtgcaaacgcgtttatgatccggctgaacagagcgatggttatcgcatactggtcgaccgcctctggccgcgcggtatcaaaaaaaccgatttagcccttgatgagtgggataaagaaatcacgccgagtacggaactgcgcaaagcctttcacggcgaagtcgtcgattatgcaacctttcgcgagcaatatcttgcagaactggcgcaacacgagcaagaaggaaagcggctggcggacatcgccaaaaaacagccgctgaccctgctctacagtgcaaaaaacaccacgcagaaccatgcgctggtgctggccgactggctacgtagcttgtgattttagtacagcatccggcggttatttttcaccagccggatggtcacgccgccacaatgcccattcatcaatcgtttcaccgcccggtaatttgcaattgttgctgaccccttgcgctgtctgcactggaatgagcgtcccgcccttctgctggcaatagacgctcgccggatttgccataccaatctgcggcggtttaggtgcttctggctgagaaggggtactacaaccagccaggaccagcaagcaaggcagaacaaaactgataattttcatttattgatctcacatatttatccaagattagagtatcgcggtatcgttttgttttgcagcactatttttattacattcactcaaaacatattacgtcttgtttcatctttgttgatgatgttttatcatgcctgcaaagattaaataatcagcatttacccgccgtatcctggagttgttccgtgagtgatcagattatcgcccgcgtcagccaatcccttgccaaagaacagagtctggaaagtctggtccgacagcttctggagatgctggaaatggtcactgatatggaaagtacctacctgaccaaagtggatgtcgaagcgcgcctgcagcatattatgtttgcccgtaacagccagaaaatgtacatcccggagaattttaccgtcagctgggattacagcttatgcaaacgcgccattgatgaaaactgctttttcagcgatgaagtccccgaccgttggggtgactgtattgcggcacgcaatcttggcatcaccacatttctgagcacgccaattcacttaccggatggaagtttctatggcacgctttgcgccgccagcagtgagaagcgccagtggagtgaacgcgcggaacaggttttacagttattcgccggactgattgcacaatatattcaaaaagaggcactggttgaacagctgcgcgaagccaatgctgcgctgattgcgcaaagctataccgacagcttaaccgggctaccgaatcggcgggcgatttttgaaaatctgacgacactgttttccctcgcccggcatcttaaccataagataatgatcgcgtttatcgatctggataacttcaaattaatcaatgatcgttttggtcataatagtggcgatctgtttctcattcaggttggcgagcgccttaatacgctccagcaaaatggcgaagttattggtcgtctcggcggtgatgagtttttagttgttagtctaaacaacgagaatgcggatattagcagcctgcgagaacgcattcagcagcaaatacgtggagaatatcacttaggtgatgttgatttgtattatcccggtgccagtcttggcatagtagaagtcgatcctgaaacaaccgatgcagacagtgccctgcatgctgccgatattgcgatgtatcaggagaaaaaacacaaacagaaaacaccttttgtcgcgcatccagcgctacattcctgaggcgtattcacatccttttgattggtgataacatgcgaatcggtattatttttccggttgtaatcttcattacagcggtcgtatttttagcatggttttttattggcggctatgctgccccgggagcataaagatgaaaaaaacaacgattattatgatgggtgtggcgattattgtcgtactcggcactgagctgggatggtggtaacgtcacctctaaaaaatagcaaaggctgcctgtgtgcagcctttgtgcaatttaagcgttaacttttaatcttcctgtagataaatagcacgacaatcgcaccaataacggcaaccacgaagctgccaaaattgaagccatcgactttaccaaagccaaacagcgtgctgatccatccgccgactacggcaccgactatccccagcaggatagtcataaagaatccacctccatctttacctggcatgatccacttcgccagaataccggcaataagcccaaaaataatccaactcagaatgcccattgtttcctcacttatctgttttgcattagcgggttagtcgctgataaaaagcatagcacaacatcgggagggcaagatttgtgacgagcatcacggaggttttttttgcgatggcgcagaaattgcgccatcaacgatcagtgataattaccaaccacaaacatcatgttcgttttccgtgtcataagaacgtacggtattcaccagatcttttatcacttcagccgccacttctggcaccagcaaagtcatcggcgtctctgtttcataatcgacagaaacgccattgctgttattggtgacggtcacggtatacgttgctttgcccatgattcatttcccgttatgaatgactttccgttgttgcgcaccttccatcaggacttcaggagccacgaagaagtcaatgttgaaataagtatcgtcagtcatggcttcaatgttgtgccacttttctggagggaacaccgcaaactgccccgcttcgataaggatcacctgatcaggctctgcactgtgttcatcagcgtagccgagatatttgaccgccccatgcataacggaaaggcgtgggtaaacccccgggcgcgttcctttatcaagatgacgttcgaatattccggcaggtgcagtttgtttattccagaaaggcgtactgcgcgtatgaatataattctgtgggatttgaagcatccttttccctccttcggtgaatgcgctgaaaacggtttattccagccgtttcagggtacgcctgataatttgcattttaaataccatttattggttactttttagcaccatatcagcgaagaatcagggaggattatagatgggaagcccgcgacaacgcgggctgaaagcatcaggattgcagcgtcgccagtcgggcagcgaaacccacgaacatcaaaccaatcagactgttgccaactttagccagtttctttttggtacgtatgtactgcgtgacaaaagcaccagatataatcaggaagctcaaatagcagaaactcaccagttccagcgtcgccgccagaataaagaaactaattcccgtatgtggggcattaacatcgataaactgtacgaaaaagctcacatagaacaaaatggctttcggattagtcaggctcaaaattaacgcgcgtttaaaaatagcaccgtattggggctcatcggatttggcctcgctatttttacccttcagggtcgcgtaaagaattttactccccagatagagcaaataaaacgcaccaagataacgtacaatgttgaataatatcggggtggtcttaattaatgtcgccactccagcccatgccagaaacatcaataccgcatcgccaataaatacaccgcaggccgcaagataaccgcctttcataccgctactgacgctatttttgagtacaaacagggtatttggccctggcaccaacacaataaaaatggccccaaccagataggtccagtaattcagaaccccgtattcagcgaacacattaacctctttaattatctttcgatcatgcgcgattaaaggtgaatatgctaaccaatctgtagcggcttagaaaggagaaaatcaggttttaacctgatatcaacccgataattgaatcattaatcaggcatgctccagactaaaattcgggtagtgctcggcaaaatactggcgtaaaaattctaccgttatccgcactttcgcactcgtcgccagcctactaacataaacggcccagacgttcgctggctggtaatattccggtagcacttgcactaaatgaccactggcaatgttttcgctaacatcccaccaggaacgcagagcaatcccctgcccatcgagacaccactgatggacaatttctccatgattagagctcagtgggccggtgactttaatcgcatgggggccttctttattgcgtaattgccagacaccaaaaggatgatcgcgctctttaatgaccaggcacggcaatgcagaaagatcggttaaatgtttcggcgcgccatgttgcgcaataaattccgggctcgcgcagagaatacggtaattggtcgccagtttgcgggcgattaaattaggggcgatgtcatcgccaatgcgaatatcgagatcgacaccttcattgaccaaatcgaccagtcggtcttccacatcaaaacgtaattccagttgcggatacgccttcgccagcgctaataacgccggagccaccacctgtcgtccaaaaccaaagctgctgataatacgcagcatcccctgcggcacctgacgcacgtcagaaagttcgtccatcatctgaccgacatcctgcaaaatccgctgcgcccattcataaatccgctctccttcttcggtaatggtgacgcggcgggtggtgcggtgtaacaacaccacgtttagcgtttgctccagcaaggcgatgcgcttgctgacgaacgccggactaacgcccagttcttccgccacggcggcaaaaccagcccggcgagccaccagcataaagacgcgcaaatcattcagcagcggtaaattattcatgattcgtgttttatgtttcaccagttacggggattaattccttttcagtcaattataggatggtgatgttgtcaattttgatggtcaggaagtgagaacccaatgatgaaaacgatgcgtattgctgcgatcccgggagacgggattggcaaagaagtccttcctgaagggattcgcgtgttacaggctgccgctgagcgctggggcttcgccttgagttttgagcaaatggagtgggcgagctgcgagtattacagccatcacggtaaaatgatgccggacgactggcatgagcaacttagccgtttcgacgccatctattttggtgccgtcggctggccggataccgttccggaccatattagcttgtggggtagcctgctgaaatttcgtcgtgaattcgaccagtacgtcaacctgcgcccggttcgtctctttcctggcgttccctgcccgctggcgggaaaacagcctggcgacatcgatttttacgtggtcagggaaaacaccgaaggcgaatattccagcctcggcggtagagtgaatgaaggtacagagcatgaagtcgtcattcaggaaagcgtatttacccgccgtggtgtcgatcgcattttgcgttatgccttcgaacttgcgcaaagccgtccacgtaagacactaacttctgccactaaaagcaacggtttagccatcagcatgccgtactgggatgagcgagtggaagcaatggccgagaattacccggagatccgctgggacaagcagcatattgatattctctgcgcgcgttttgtgatgcagccggaacgattcgatgtggtggtggcgtccaatttgtttggcgatatcctttccgatcttggcccggcctgcaccggcaccattggcattgccccatccgccaacctgaatccggaacgcactttcccgagcctcttcgagcctgtccacggttccgcgccggatatctacgggaaaaatattgctaaccctatcgccacgatttgggccggggcaatgatgctcgattttctcggcaatggcgatgagcgtttccagcaagcgcataacggtattctggcagcaattgaagaagtgattgctcacgggccgaaaacacctgatatgaaaggcaatgccaccacgccacaggttgccgacgcgatttgcaaaattattttgcgttaaggtcaaaccagtttatttgaaccgcgtcactgacgcggtttttttattcgttctttgcagtaaataacctgcgtcatttcaccttttattgtttccgtttcgtgttttatggctttccgtattcttaattgtttaatttatgtaacatgcaaattttgttacgcgtacgttaggttccgccgtacaggtattggttttgctggcaatgggactggtgatttatttagccaccagtaaatacggcaatattcgtcttggcgaaggaaaaccggaatacagcacgctctcctggctgtttatgtttatttgtgccggtttaggttcttctacgctttattggggggttgctgaatgggcctattattatcaaacacctggattaaatatcgcaccgcgtagtcaacaggcactcgaatttagcgttccctactctttcttccactggggcatcagcgcctgggcaacttatacgctggccagtttaatcatggcttatcactttcatgtgcggaaaaacaaaggtctgagcctttccggcattattgctgctattaccggcgttcgcccgcaaggcccatggggaaaactggtcgatttgatgttcctgatcgccactgtcggcgcactgaccatttcccttgttgttaccgcagcaacctttacccgtgggctttccgcgctgaccggtttacccgataacttcaccgtgcaggcatttgtgatcctgctttccggcggcattttttgcctaagcagctggattggtatcaacaacggtttgcaacgtctgagcaaaatggttggctggggcgcgttcctgctgccattactggtgctgattgtcggcccaaccgaatttattaccaacagcatcatcaatgccatcggcctgaccacgcaaaacttcctgcaaatgagcttattcaccgatccgcttggcgatggtagttttacccgcaactggaccgttttctactggctgtggtggatcagttacacccctggcgtagcaatgtttgtcacccgcgtttcccgcggtcgtaagattaaagaagttatctggggactgatcctcggcagcaccgtcggttgctggttcttctttggcgtaatggaaagctatgccattcatcagtttatcaatggcgtaatcaacgtcccacaggtgctggaaacactgggcggcgaaacagctgtacagcaagttctgatgagcttgccagccggtaaattgttcctcgccgcatacctgggcgtgatgattattttccttgccagccatatggatgcagtggcctacaccatggcggcgaccagtacgcgtaatctccaggaaggtgacgatcctgaccgtgggctgcgtcttttctggtgcgtggtgatcactctgatcccgctttccatcttgtttaccggtgctagcctggaaacgatgaaaaccaccgtcgtgctcacagcccttcccttcctcgtcattttactggtgaaagtcggcgggtttattcgctggctgaaacaggattacgccgacattccggctcatcaagttgaacattatctcccgcagacaccggttgaagccctggaaaaaacgccagtgctccctgcgggaaccgtattcaaaggcgacaactgagcgccatcatcctaacgataaaggtatccctatgagcaatctgagccctgactttgtactacccgaaaatttttgcgctaacccgcaagaggcgtggaccattcctgcccgtttttataccgatcagaacgcgtttgaacacgaaaaagagaacgtcttcgccaaaagctggatttgcgtcgctcacagcagcgaactggcgaatgccaatgattatgtgacgcgtgagatcattggcgaaagcatcgtgctggtacgcggtcgtgataaggttttgcgcgcgttctataacgtgtgtccgcaccgtggtcatcagttgttgagcggtgaaggaaaagcaaaaaatgtgattacctgcccgtatcacgcatgggcattcaaactcgatggcaacctggcccatgcacgtaactgcgaaaacgtcgccaatttcgatagcgacaaagcgcaactggttccggtgcgtctggaagaatatgccggattcgtcttcatcaacatggaccccaacgccaccagcgtagaagatcaattacccggcctgggcgcgaaagtgctggaagcctgcccggaagtccacgatctgaaactggcggcccgctttaccacccgcacgcctgccaactggaagaacattgtcgataactatctcgagtgctatcactgtggtccggcgcatccaggtttctccgactccgtacaggttgatcgttactggcacaccatgcacggtaactggacgctgcaatacggtttcgccaaaccgtccgaacagagctttaaatttgaagagggtacggatgcggcattccacggtttctggctgtggccgtgcacgatgctgaacgtcaccccgatcaaagggatgatgacggtcatttatgaattcccggtggattctgaaactaccctgcaaaactacgatatttacttcaccaatgaagagttaaccgacgagcaaaaaagcctgattgagtggtatcgcgatgtgttccgtccggaagatttacgtctggttgaaagcgtacagaaagggctgaaaagccgtggctatcgtggtcaggggcgcatcatggccgacagtagcggtagtggcatttccgaacatggtatcgcccatttccataatctgctggcgcaggtgtttaaggactaatgacatcggcggcggtattttccgccgctgggctgatttttgatggagtacagcaatgagtgactatcaaatgtttgaagtacaggtgagccaggttgaaccccttaccgaacaggtgaaacgcttcacgctggtggcaaccgatggcaaaccattacctgcgtttaccggaggaagtcacgtcattgtgcagatgagcgatggtgataaccagtacagcaatgcgtatagtctactgagtagcccgcatgacacctcttgttatcagattgccgttcggctggaggaaaacagccgcggcggttcccgctttttgcatcagcaggtaaaagtgggcgatcggttaacgattagtacgcctaataacctgtttgcgctaattcccagtgccagaaagcatctgtttatcgcgggcggtattggtatcacccctttcctgagccacatggcagagctgcaacacagcgacgtcgactggcagctacattactgcagccgaaatccagaaagttgcgcatttcgtgatgagctagtccagcatccgcaggctgagaaagtccatttgcatcatagtagtaccggaacacgactggaattagcgcgattattggcggatatcgaacctggcacacacgtttatacctgtggccccgaggcgctaattgaagcggtaagaagtgaagctgcgcgtctggacatcgccgccgatacgctgcactttgagcaatttgctatcgaagacaaaaccggcgatgcatttaccctggtgcttgcccgttccggaaaagagtttgtggtgccggaagagatgactattttgcaggttattgaaaataataaagccgcgaaagtggaatgtttatgtcgtgaaggggtatgcggaacctgcgaaacagcaatactggaaggtgaagctgaccatcgggatcaatattttagcgatgaagagcgtgccagccagcaaagtatgttgatctgttgtagccgtgcgaagggtaaacgcctggtgttggatttgtaatttgccgaagccggatgtggcgctgagcgcgcccagtccggcttcggaagattttactgcggatattcctgcaataaattgtgtaatgcttccgccatcagctcaccacgccagccggaaatcagctccggcaaattgttctgcggtttcagtttccagtgccagttcagcagttggttgatttgccgacggcttgccagcaattcggcgctgatcttatgcgtttcgctcacgtcagtaatcaggctcttaatcgctttaaacgctttacgataacccggcatgtccatcaggttaagcatcggctgcggtaaggcatcttccggcaatgtctgcgctttttccaccagcgctagcagcgttttaccgtgaaagcggatttcgctaccggataaacccaggctgtccagttcgcctaaacttcccggcatataacgcgctacgctccacaaatgctcttcacgcacgacaaagttcaccgccagatcgcgctctcgcgccttgcgcagtcgccagtcggctaacagttgcagacaggccagttggcgtgtgcgtaattgccaggcattggtgatatcacgccaggcatcttccggcgcaacgacttcctgacgacgcatttgcatcaggcggcattcatccagcgccgcaggtagccagccggaggcctccgtttctaccataagcttggcggtgatcggtaacagataccagacatccgccgctgcgtattcacactgacgttcggtcagcggtctggccagccagtcggtgcggctttcactcttgtccagcgtaacgccggaatactcttccaccatggaagcgaaaccccaactcatcgggcgtccgcagaaggcagcaaggatttgcgtgtcaatcaagggttgtggtaattcgccaaagacattgaggaacacttccagatcttcactgcctgcatggagaaattttgtgatggacggatcgcgcaggatcgctttcagcggactccagtcggtgatcccgagtggatcgattagcgccagatgctcgccatcgaaaagttgaatcaaccccagctgcgggtaataagtgcgcgtacgaacaaattcagtatccagggctatcgccggaaaggcacggacggcttcacacaaagaagccagcgcatcgtccgtggtaatcatttggtaattcaaattgttttctctttagtgggcgtcaaaaaaaacgccggattaaccggcgtctgacgactgacttaacgctcaggctttattgtccactttgccgcgcgcttcgtcacgtaattctcgtcgcaaaatttttccgacgttagatttcggtaactcatcacgaaactccaccagcttcggtactttgtatcccgtgagctgacggcggcaaaaagtcaccagactctcttcggtaaggcttggatcttttttcactacgaagattttcaccgcttcaccactggagccggaaggtacgccaacagccgcgacttcctgtacgccaggatgctgcatgacgacatcttcaatctcgttgggatagacgttaaaaccggaaaccagaatcatgtcttttttacgatcgacaatgcgcaggaatccttcttcatccattaccgcgatgtcgccggtgtgtaaccagccatttttgatgatttcatcggtagcatcgggacgctgccagtaacccagcatcacctgcggtcctttgacacaaagctcacccggttgacctggtggtacttcattatcatcatcatccaccagtttggcttccgtgctcggcaccggcaaaccgatgctaccactatgataatcaatatcatatgggttaacgctgaccagcggcgcacactcggtaaggccatagccttccagcagatactgtccggtcagtttcacccaacgctctgccaccacttgctgcactggcatcccaccgcctgcggaaagatgcagactggagaaatccagctgctggaactctttattgttcagcaacgcattgaacaaggtgttaacgcccgtgatagcggtaaacggatatttcgctaactcttttaccaaccctggaatatcgcgcgggttagtgataagcaggttctgcccacccagttcgataaacagcaggcagttaatggtcagggcaaaaatgtgatacagcggcagcgccgtcaccaccagctctttgcccggatgcaacagcggaccataggtcgcgttaacctgttccaggttcgccagcatattgcggtgagtcagcatcgcgcctttcgccacaccagtggtgccgccggtgtattgcagaaaagctaaatcttccggcaccagttcgggtttgacgtactgcatccggtagccgttatgcagtgcgctacgaaaactaatggcatctggcagatggtatttcggcaccaaacgcttgatgtatttaacaacgaaattgactaccgtgccttttgccgtagatagctgatcgcccatacgggtcagaattacgtgctgaacggcggttttatcaaccactttttccagtgtgtgagcaaagttagacacgataacaatcgcgcttgcgccgctatcgttaagctgatgctcaagctcacgcggggtatacaacgggttaacgtttacgacgatcatcccggcacgcaaaatgccaaacagcgccaccggatattgcaataaattaggcatcatcaacgcaacgcgatcgcctttcttcagccccaacccttgttgcaaataagcggcaaacgcgcgactgcgttcttccagcttgcggaaggtcattacctcccccatattcacaaacgcaggttgatcggcgtagcgcgcgacgctctgctcaaacatatctaccagagattgataacggtcagggttgatctccgtcggaacgtccgcgggataacggttaagccaaaccttcttcaattcttcacctctaaaatgcgtgttcgtcgtcatcgcaaccccaaatgatatacatgccgttaacataatattaactcatcataccagcttgataattacccaacgaaaaggttgcgaagcgcgtcactatttatttttatctttaccgtaagaatgcagaaacagcggaccagccgctgtttctttttctttaaaaacaagcaattattcagttacaactgtttgtactctcgcggggccgggattataccagccccatccgccgtagccatagggccagccacgaccgccataaaaccatggatcaatcggctgaggcggcataatcacctgctgggttaaatgccaacgtttgtaacccgttacttgcatcaccataaatttatagggcgtattgccgattttgccgtcaaccgcaccagtgattggcccgactaccgtaaccagttgtccacggaaatccaccgggtccagaaaaccgttcacatcggcataaatgcgaccgcgagaaggttctcccagcgtcggtctggctccgctgtccagcggtacggtagcaatttccaggcgagttttcccttgctggttttgtaccgcaaccactttgccaccaaagcgtgcctcctgaccaacgtacagctgcggcgcactcatcacccgaactaaatcttgttgcggcgtgggactgctgcctttaatggcgtccggcacagtgacacaaccgctcagcattagcgcaaacgtacctgccagtatgcctttgataacattcttttgaaccgccatggtgcgactcctttttttctcagggcatactcttaagattcattctttgcccggaagtttcttccatgcgacgttgttacgtaaataaaccggttcggcatgttccaccgccaccgttttaccctcagcaaacatctgacacgcaatcggcagcatatcttcagcagcaggcagtaacacttcgccatcgcgcaaaaccagcccgctctctttaccgagatccggccaagcttgccagcccgtccctaccgtcacccattcgccggaaagctgttgcattcgttcatggacgatttcgggtttgagtacggcttcggtttcttcaccgtgccagataccgttttcatcacgctgatattcggcccagtaaacttcgcccattcgcgcgtcaatggctgccagcacgcgggttgcgccgtttttgcgccacgccccttgcgccatcgtcattagcgtggagacgccaatcatcggtaattccgcgccaagcgccagcccttgcgcgatgccaataccaatgcgcacgccagtaaagctaccggggccgcgcccgtaagccagagcgttaatatcagtcagggaagttccgctggtggtcaggatatcctgcaccatcggtaagattcgttgagtatgttcacgagggcaaagctcaaaatgagcgttgacagtaccgtcgttccacagggcgacagagcaggcctctgtcgcggtatcgatagccagaattcgcatgggtcttcgtgcttagatcaataaaaaggcgcgcatcataccatactccgtaacaaattacctggaggatggtatcgcaaggaaacgaaccgcacgggcaatgtcacgggtgcgtggcgcgggcggcagactggcgagaaacgtcgcgccgtaaggacgcatcaccagccgattgtcacaaatcaccagcacgccacgatcgtcggcgtcgcgaatcagtcgccctaccccctgtttgagagtaatgacggcatctggtagttgcacttcatcgaacgggtcgccaccgcgcaaacgacaatcttccatgcgcgcttttaacagtggatcatccgggctggtaaacggcaatttgtcgataattaccaaactcaatgtatcgccacgcacgtccaccccttcccagaaactgctggttgccacaagaagcgcattaccggcgctgacaaattgctgcaacagttgccctttgctggtttccccctgcaacaatacaggaagcgtcatggtagcgcggaactgctcggccagatcgcgcatcatggcgtggctggtacaaagcataaaacaacgaccgttgttagcttcgatgatcggtcgcagcattgccgctaactggcgagcagaacctggctggttggtttgcggcagattgcgcagcacacagagtaacgcctggcggctgtaatcaaatgggctgggcaacagcaagctctcggcctgttcgatgccaagccggctggtgaaatgatgcagatcgtcgttcacgctcagcgttgcactggtgaagatccagctaccgggtttttgcgccattaactctttgaatttatccgccacgctgagcggcgtgagagccagagtaaaatggcggctagtgcattcgtaccagtagctgtagcccggctgattgatctcttttagccgcttcagccgtgtgcgatacaacgtggcgcgctcaaatgccgcatccagcaaggcggaacgccccagactcagtttcgccacgtcataacaaagttccagggtgtcatcgagcagtaaaaatgcccgctgaatttgcggattagctaacagctcacgcaggttaccgcgataacctggctcaccgagttgcagacgaaaatcctgcgcactctgggcaagacgatcagcgcacttttgtaactgctgggtgtcttttaattcggtgcggtaggcgatggtgatgtcttttgccaggtcgagcagttgtcgactggagagactctgaccaaaatactggctggcaatgtccggtagctggtgggcttcgtcgaagatcatgacgtccgcttccgggatcagttcgccaaatccactctctttaaccaccatatccgccagaaagagatgatggtttaccaccaccacatcggcgtccatcgcttttttacgtgctttgaccacaaagcaatctttatacatcgggcagtcgctgccaagacagttgtcgttggtgctggtgaccagcggccacgcctgactatcttccgccacgctgacgcaggtgctgatatcaccatcgactgtttgattagaccaggagcgcagcaggatcacatcgcttaagatttgtaccggcagatcgccccccgccagcgcctgctgttcgagacgttcgaggcagaggtagttactgcgccctttcagcagcgccacgttgcccgtatatttcaatgccttactgactgttggcaaatcgcggctgtagagctgatcctgcaacgctttactgccggtgctgataatgactttctttttcgcccgcagcgcaggagccaggtaagcgtaggttttgcccgtaccggttcctgcttccaccaccagcggctggcctttttctatcgcctgggtgacggctaccgccatctgtcgctgtggttctcgcggcttaaagcctggtatcgctttcgccagctgaccgtctggtgcaaaatcgtccgtcacactaccccctgttgatttgaacagggattatgtcaggatgagggcgctttcgccagttgaagtggtgacggcgacctcacattgtggcagtctttgcagcacgaaaatggaagtataatgaggacaaaatgatgactatcgttcgtatcgatgctgaagcccgctggtctgatgtagtaatccacaacaacacgctctactacactggtgtaccggaaaacctcgacgccgatgcctttgagcaaaccgccaacacgctggcacagattgacgccgtgctggaaaaacagggcagcaataaaagcagcattctggatgccaccattttcctggccgataaaaacgacttcgcggcgatgaataaagcgtgggatgcttgggttgtcgcgggtcatgcgccggtgcgctgcacggtacaagcgggtttgatgaacccgaagtataaagttgaaattaagattgtggctgcggtgtaagctttatcgaagcaaaataagtcagacgataatttatcgataatactggtcggttttacataaatcgaccagagaataagatattactgttgatgcttctgctaattcattatttatatttataatttcaattttatctataaaactaactatataaataaacataaacatgccgttgtgttcgccctttgattagcaactctggttttctttcttagctgaacaatctggttatagcgtgcggactgaccgttaaatttctccatcttactggataacacaccatgagctgctacctttaaaacacctgaatgtcaacaggttaactcgtgccatatcgttataatccctttgatattagatgcaaattaaggtcatatatagccttatcgataacatggttaattttaaggataagaatatgcctgctgtaatagataaagccctggatttcattggtgccatggatgtaagtgcgccaacaccaagtagcatgaatgaaagcacggcgaagggaatctttaaatatttaaaagaactgggagtacccgcgagtgccgctgatattacggcgcgagctgaccaggaaggctggaaccctgggttcacggaaaaaatggttggatgggcaaaaaaaatggagacaggtgaacgttctgtgattaaaaatcctgaatactttagtacatatatgcaggaagaactaaaagcactggtctgagttaaatttatatcagcataaatgggtcaggacgcttttaatcacatataaaaagcgtcctttttctcacaatcaaatgatcatcggcttctataacgaaatcgatacggattagtgtgttactcgtcttcatcctcaaaacgcgccacgattcgctcgccggagtggttggcacgcagctcttctgccaccagcgcgattgcctggccgctgctcatcccttgtgccatcagttcctggatccgctcgacagctttttgctgctgttcatgggtgagactaggtaaacctgcaaacattgttaactcctgctaaattgttggcgctaattatttcatgctacccggcacatagccagtagagtcaggactgatgaagacgttatctcccgctgtgattactttactctggcgtcaggacgccgctgaattttatttctcccgcttaagccacctgccgtgggcgatgcttttacactccggctatgccgatcatccgtatagccgctttgatattgtggtcgccgagccgatttgcactttaaccactttcggtaaagaaaccgttgttagtgaaagcgaaaaacgcacaacgaccactgatgacccgctacaggtgctccagcaggtgctggatcgcgcagacattcgcccaacgcataacgaagatttgccatttcagggcggcgcactggggttgtttggctacgatctgggccgccgttttgagagtctgccagaaattgcggaacaagatatcgttctgccggatatggcagtgggtatctacgattgggcgctcattgtcgaccaccagcgtcatacagtttctttgctgagtcataatgatgtcaatgcccgtcgggcctggctggaaagccagcaattcagcccgcaggaagatttcacgctcacttccgactggcaatccaatatgacccgcgagcagtacggcgaaaaatttcgccaggtacaggaatatctgcacagcggtgattgctatcaggtgaatctcgcccaacgttttcatgcgacctattctggcgatgaatggcaggcattccttcagcttaatcaggccaaccgcgcgccatttagcgcttttttacgtcttgaacagggtgcaattttaagccttagcccagagcggtttattctttgtgataatagtgaaatccagacccgcccgattaaaggcacgctaccacgcctgcccgatcctcaggaagatagcaaacaagcagtaaaactggcgaacagtgcgaaagatcgtgccgaaaatctgatgattgtcgatttaatgcgtaatgatatcggtcgtgttgccgtagcaggtagcgtaaaagtaccagagctgttcgtggtggaacccttccctgccgtgcatcatctggtcagcaccataacggcgcaactaccagaacagttacacgccagcgatctgctgcgcgcagcttttcctggtggcagtataaccggggctccgaaagtacgggctatggaaattatcgacgaactggaaccgcagcgacgcaatgcctggtgcggcagcattggctatttgagcttttgcggcaacatggataccagtattactatccgcacgctgactgccattaacggacaaattttctgctctgcgggcggtggaattgtcgccgatagccaggaagaagcggaatatcaggaaacttttgataaagttaatcgtatcctgaagcaactggagaagtaagacgtggaataccgtagcctgacgcttgatgattttttaagccgctttcaacttttgcgcccgcaaattaaccgggaaaccctaaatcatcgtcaggctgctgtgttaatccccatcgtccgtcgaccgcaaccggggttgttgctgactcagcgtagcattcatctgcgtaaacacgctggacaagtggcattccctggaggtgcagtcgatgacacggacgcaagtgctatcgccgccgcgctgcgcgaagctgaagaagaggtcgctataccgccttccgccgttgaagttatcggcgtgctgccgcccgtcgatagcgtcactggctaccaggtaaccccagtggtcggcattatcccgcccgatctgccgtatcgcgccagtgaagatgaagtcagcgcggtgtttgaaatgccgctcgcccaggcattacatctgggtcgttatcaccctttagatatctaccgccgtggtgatagtcatcgggtatggctgtcctggtacgaacagtattttgtatggggaatgaccgcaggcataattcgtgagctggcgctgcaaattggtgtgaaaccctgactatacttatctttacatctacaaaacactacttgagacaatcatcgcaatattagttaaatcgcggtttttgattagtttaattcatgtgaatagttaagccagtcgccgcgttccctcttacactatgcgctgttattagttcgttactggaagtccagtcaccttgtcaggagtattatcgtgattagtctattcgacatgtttaaggtggggattggtcccagttcttcccataccgtagggcctatgaaggcaggtaaacagttcgtcgatgatctggtcgaaaaaggcttactggatagcgttactcgcgttgccgtggacgtttatggtagtctgagcctgacgggtaaaggccaccacaccgatatcgccattattatgggtcttgcaggtaacgaacctgccaccgtggatatcgacagtattcccggttttattcgcgacgtagaagagcgcgaacgtctgctgctggcacagggacggcatgaagtggatttcccgcgcgacaacgggatgcgttttcataacggcaacctgccgctgcatgaaaacggtatgcaaatccacgcctataacggcgatgaagtcgtctacagcaaaacttattattccatcggcggcggttttatcgtcgatgaagaacactttggtcaggatgctgccaacgaagtaagcgtgccgtatccgttcaaatctgccaccgaactgctcgcgtactgtaatgaaaccggctatagcctgtctggtctcgctatgcagaacgaactggcgctgcacagcaagaaagagatcgacgagtatttcgcgcatgtctggcaaaccatgcaggcatgtatcgatcgcgggatgaacaccgaaggtgtactgccaggcccgctgcgcgtgccacgtcgtgcgtctgccctgcgccggatgctggtttccagcgataaactgtctaacgatccgatgaatgtcattgactgggtaaacatgtttgcgctggcagttaacgaagaaaacgccgccggtggtcgtgtggtaactgcgccaaccaacggtgcctgcggtatcgttccggcagtgctggcttactatgaccactttattgaaagcgtcagcccggacatctatacccgttactttatggcagcgggcgcgattggtgcattgtataaaatgaacgcctctatttccggtgcggaagttggttgccagggcgaagtgggtgttgcctgtagtatggctgctgcgggtcttgcagaactgctgggcggtagcccggaacaggtttgcgtggcggcggaaattggcatggaacacaaccttggtttaacctgcgacccggttgcagggcaggttcaggtgccgtgcattgagcgtaatgccattgcctctgtgaaggcgattaacgccgcgcggatggctctgcgccgcaccagtgcaccgcgcgtcagcctggataaggtcatcgaaacgatgtacgaaaccggtaaggatatgaacgccaaataccgcgaaaccagtcgcggtggtctggcaatcaaagtccagtgtgactaatacttcttactcgcccatctgcaacggatgggcgaatttatacccgctttctcgtctgctgtaatattccccactacacttccactgttgcgtcaggcgtttgtcgccatacgcttacagggtggcccgcatgcaaaaagcacaacggatcattaaaacctatcgtcgtaatcgaatgattgtttgtacgatttgcgcactcgttacgctcgctagcaccctgagcgtgcgatttattagtcagcgtaacttaaatcaacaacgggtagtacaattcgccaatcacgctgtagaggaattagataaagtactgcttcccctacaggcaggtagcgaagtcttgcttccgctgattggtctgccctgctctgtcgcccatttgccattacgtaaacaggcggcaaaactccaaactgtgcgatccattggcctggtgcaagacggcacactttattgctccagcatttttggttatcgcaatgtgcccgtcgtggacattctggctgaacttcctgcaccgcaaccacttttacgcctgacgatcgaccgtgccctgattaaaggcagtccggttttgattcaatggacgcctgcagcgggcagtagcaatgctggggtcatggagatgattaacatcgacttactgacggcaatgctgcttgagccacaactgccgcaaatcagtagcgccagcctgacggtggacaaacggcatttgctctatggtaatgggctggtagattcccttccgcaacctgaagacaatgaaaactatcaggtttctagccaacgctttccttttaccattaacgttaatggtccgggggctacggcgctggcatggcactatcttccaacacaattaccgctggcggtgctgctaagtttactggtgggctacatcgcctggctggcgaccgcttaccgaatgagcttttcccgcgaaatcaatctgggcctggcgcaacatgagttcgaattgttctgtcagcctttgcttaatgcgcgcagccagcaatgtattggtgtagagattttgctgcgctggaacaatccgcgtcagggctggattagtccggatgtgtttattcctatcgcggaagaacatcatttaattgtgccactgacccgctatgtgatggcagaaaccattcgtcagcgccatgttttcccgatgagtagtcagtttcatgttggcattaacgtcgcacccagccattttcgccgtggtgtgctgataaaagatctcaatcagtactggtttagcgctcacccgattcagcaactgatcctcgaaatcaccgaacgcgatgccttactggatgttgattatcggattgcccgcgagctgcatcgtaaaaacgtcaaactggcgattgatgacttcggcaccggcaacagcagcttttcctggcttgaaacattacgtcctgacgtgctgaaaattgataagagttttaccgcagctataggttctgacgcggttaacagcacggtgaccgatatcatcatcgcgctggggcaaagactgaatattgaactggtggcggagggcgtggaaacgcaagaacaggcgaagtatttgcgccgtcatggcgtgcatattttgcaagggtatttgtacgcacagccgatgccgctacgtgattttcccaaatggctggcgggcagccaaccgccgcccgcccggcataatggacatatcacgcccattatgccgttacgttaacgcttactcatcttcatcgtgcgccggttgctctttaacaatgcgaaccagatcaacacgataatcattggcttcaatgatggtgatatgcagtggccctacatcaatcacatcgcccacacggggaatgtgaccatttgcgctgatcacgaggcccgcgaccgtcgcgatatcatcgtcatcggcaaggtgctcaacatcaagcgcctgctgcaaggcatgcaaatctgtaccgccttttaccagccagccgtcaccatcagtaatgatttccggcgtttcgtcagcgtccgggaattcacccgcaatggcttccagcacatccagcggcgtgaccagaccttgtaccacaccaaactcgttggtcacgataacaaagctcccgcgagcacgacgcagcacgcccaacaggttgatcggatcgagggtttccgggacgataatcgccggagacgcgctagcaatcgccgccacatcaacgccctcttccagcgccaccagcagttctttagcacgtacaataccgatgatttcatccagttcaccgcgacataccgggaacagactgtgcggactagagagcagttgctcgcggatttcatcgaccccgagattagcgtcaacccagcttatttcaccgcgcggcgtcatgatcccgcgcagagaacggctcgccagcgtcagtacgccgttaatcatgtaacgttcttcttcggcaaatgcaccttccgggatcggcatcggcatcgggttatcggcatcgtgctgaacattggcctgacgtttcccgcccatcaaacgcaggatggcatcggcagtacgcgctcgcagcggcaaagtgctctggtggcgaataaagttgcgacgcgcaatctggttaaacacttcgatgatgatgctgaagccaatcgcggcatacaggtaacctttcggaatgtggaaaccgaaaccttctgccaccagactcagaccaatcattaacaggaagctcagacagagcaccaccaccgtggggtgctggttaacgaatcgcgtcagcggtttggatgccagcaacataaccgccatcgcaatcactaccgccgccatcatcaccggcagatggttaaccatccctactgcagtaattaccgcatccaagctgaagacggcgtcaaggatgacaatctgtgtgacgaccacccagaaactggcgtagcctttaccgtggccggaatcatgatcgcggttttccagccgttcatgcagttcggttgttgctttgaacagcaagaatatccccccgaacaacataatcaggtcgcgtccggagaaggagaaatccatgacggtaaatagcggtttggtcagcgtgaccatccaactaatcaggctcagcagccccagacgcataatcagcgccagacttaaccccagcaaacgcgctttatcgcgttgttttggcggcagtttgtcagcaagaatggcgatgaagaccaggttatcgatacccagcacaatttcgagaacaacaagcgtgagtagccccgcccaaatactggggtccattaagaattccatgacaagctcctgcttaaggaatagctattcgacgccagaaataatgcaggcgtaacgacaaaatgcaaacgaaaggtgcggcatagagtgccagaaaggcaggcgttaaaaggcctgatgctgaaatgacgtcggtgacgatccatactgcgggctactgccctatactccatggttgttaaacgggagttaaacatatcagagacgcctctgatttggcaaagatttaccttcctttgcaaacgaatgtgacaaggatattttacctttcgaaatttctgctaatcgaaagttaaattacggatcttcatcacataaaataattttttcgatatctaaaataaatcgcgaaacgcaggggtttttggttgtagcccttatctgaatcgattcgattgtggacgacgattcaaaaatacatctggcacgttgaggtgttaacgataataaaggaggtagcaagtgaccattgctattgttataggcacacatggttgggctgcagagcagttgcttaaaacggcagaaatgctgttaggcgagcaggaaaacgtcggctggatcgatttcgttccaggtgaaaatgccgaaacgctgattgaaaagtacaacgctcagttggcaaaactcgacaccactaaaggcgtgctgtttctcgttgatacatggggaggcagcccgttcaatgctgccagccgcattgtcgtcgacaaagagcattatgaagtcattgcaggcgttaacattccaatgctcgtggaaacgttaatggcccgtgatgatgacccaagctttgatgaactggtggcactggcagtagaaacaggccgtgaaggcgtgaaagcactgaaagccaaaccggttgaaaaagccgcgccagcacccgctgccgcagcaccaaaagcggctccaactccggcaaaaccaatggggccaaacgactacatggttattggccttgcgcgtatcgacgaccgtctgattcacggtcaggtcgccacccgctggaccaaagaaaccaatgtctcccgtattattgttgttagtgatgaagtggctgcggataccgttcgtaagacactgctcacccaggttgcacctccgggcgtaacagcacacgtagttgatgttgccaaaatgattcgcgtctacaacaacccgaaatatgctggcgaacgcgtaatgctgttatttaccaacccaacagatgtagagcgtctcgttgaaggcggcgtgaaaatcacctctgttaacgtcggtggtatggcattccgtcagggtaaaacccaggtgaataacgcggttagcgttgatgaaaaagatatcgaggcgttcaagaaactgaatgcgcgcggtattgagctggaagtccgtaaggtttccaccgatccgaaactgaaaatgatggatctgatcagcaaaatcgataagtaacgtattgtgttgattatcactcagttttcacacttaagtcttacgtaaacaggagaagtacaatggagattaccactcttcaaattgtgctggtatttatcgtagcctgtatcgcaggtatgggaagtatcctcgatgaatttcagtttcaccgtccgctaatcgcgtgtaccctggtgggtatcgttcttggggatatgaaaaccggtattattatcggtggtacgctggaaatgatcgcgctgggctggatgaacatcggtgctgcagttgcgcctgacgccgctctggcttctatcatttctaccattctggttatcgcaggtcatcagagcattggtgcaggtatcgcactggcaatccctctggccgctgcgggccaggtactgaccatcatcgttcgtactattaccgttgctttccagcacgctgcggataaggctgctgataacggcaacctgacagcgatttcctggatccacgtttcttctctgttcctgcaagcaatgcgtgtggctattccggccgtcatcgttgcgctgtctgttggtaccagcgaagtacagaacatgctgaatgcgattccggaagtggtgaccaatggtctgaatatcgccggtggcatgatcgtggtggttggttatgcgatggttatcaacatgatgcgtgctggctacctgatgccgttcttctacctcggcttcgtaaccgcagcattcaccaactttaacctggttgctctgggtgtgattggtactgttatggcagtgctctacatccaacttagcccgaaatacaaccgcgtagccggtgcgcctgctcaggcagctggtaacaacgatctcgataacgaactggactaacaggtgagcgaaatggttgatacaactcaaactaccaccgagaaaaaactcactcaaagtgatattcgtggcgtcttcctgcgttctaacctcttccagggtagttggaacttcgaacgtatgcaggcactgggtttctgcttctctatggtaccggcaattcgtcgcctctaccctgagaacaacgaagctcgtaaacaagctattcgccgtcacctggagttctttaacacccagccgttcgtggctgcgccgattctcggcgtaaccctggcgctggaagaacagcgtgctaatggcgcagagatcgacgacggtgctatcaacggtatcaaagtcggtttgatggggccactggctggtgtaggcgacccgatcttctggggaaccgtacgtccggtatttgcagcactgggtgccggtatcgcgatgagcggcagcctgttaggtccgctgctgttcttcatcctgtttaacctggtgcgtctggcaacccgttactacggcgtagcgtatggttactccaaaggtatcgatatcgttaaagatatgggtggtggcttcctgcaaaaactgacggaaggggcgtctatcctcggcctgtttgtcatgggggcattggttaacaagtggacacatgtcaacatcccgctggttgtctctcgcattactgaccagacgggcaaagaacacgttactactgtccagactattctggaccagttaatgccaggcctggtaccactgctgctgacctttgcttgtatgtggctactgcgcaaaaaagttaacccgctgtggatcatcgttggcttcttcgtcatcggtatcgctggttacgcttgcggcctgctgggactgtaagactgttgtacactaccggggccttttggccccgtttttttatctggaggattaatgacaatcacggacctggtactgattcttttcatcgccgcactcctggccttcgcgatctacgatcagttcatcatgccccgccgtaacggccccaccctgctggcaattcctttgctccggcgtggtcgcatcgatagcgttatcttcgtcggattgattgtcattcttatctataacaacgtcacgaatcatggtgcgttaataacgacatggttattaagcgcactggctctgatgggtttttatatattctggatccgcgttccgaagatcatctttaaacaaaaaggttttttcttcgccaatgtctggattgaatatagccgaatcaaagcgatgaacttgagcgaagatggcgtgttggtgatgcaattagaacagcgtcggctgttaatccgcgttcgaaatatcgacgatctggaaaaaatttataagcttctcgttagtactcaataagttatgaatttagccaaagctatgtttagtgtatttttaataatcagacatagcttaggctatattacctcttcccttatttgttatttattttaacgtttcattgatatataaatccaaatgaaaatcgttatcaataaagcaatgaaataatatattccaacagttgttttatattctcaaaatatgttaaggttgcgccctcatttggggagtagccgatttccagattccggaaatgtacgtgtcaacatactcgttgcaaaacgtggcacgtacggactgaatactttcagtcaggcgagaccatatgcacatcaatcgctatgcctgcatgaacgcgaaaaccatcacggcttgttgttcatgtatgcatgtttgctgggggcgatgatgtgttttatggataccccggtcaggacattgtcatgaatatcactgctactgttcttcttgcgtttggtatgagcatggatgcatttgctgcaagtatcggtaaaggtgccaccctccataaaccgaaattttctgaagcattgcgaaccggccttatttttggtgccgtcgaaaccctgacgccgctgatcggctggggaatgggcatgttagccagccggtttgtccttgaatggaaccactggattgcgtttgtgctgctgatattcctcggcgggcgaatgattattgagggttttcgtggcgcagatgatgaagatgaagagccgcgccgtcgacacggtttctggctactggtaaccaccgcgattgccaccagcctggatgccatggctgtgggtgttggtcttgctttcctgcaggtcaacattatcgcgaccgcattggccattggttgtgcaaccttgattatgagtacattagggatgatggttggtcgctttatcggcagtattattgggaaaaaagcggaaattctcggcgggctggtgctgatcggcatcggcgtccagatcctctggacgcacttccacggttaataagaacgctgccagaggtgaatattaaagtccgtctggcagtcgaacacttcttttgctgccagtgtttgccagacttctggcttcgcacgccaggcaaacggcgtcatctgcaataatgcgacggcttcatcaccgcgaagacgcatcggataacacaactccgcactctgctgtaatgtaaaaccttccagttgttctgcatgaggtgcatgaagatgtacttcattgtaaatcagccccttcagctccatcaaatgtcgcggtcccggcgtggcagtaatgacccagccgccgggcttcactactcgtgctaattcttctgctttacacggcgcgtaaatacgtattatggcgtccatactggtatcggaaaacggcaaacggtggctggaagcgacacaaaaagtgacctgcggatagcgtttcgccgccgcttttatcgctaccttgctaacatccagaccaaacgtggtgatttcgggcaacgcatcggcaaatgcgtgtgtgtaatacccttcaccacagccaatatccagcaccgccgtggccttatcatcaagccgttccctcagttgggcgacaattgcatcacgcagcggctgataatgtccggcatctaagaatgcgcggcgtgcttgcatcatttccgcgctgtcgcccggatcacgagaccgtttatgctgaacgggcagcagattgacatacccttctttcgccatatcaaactgatgtcgctggggacagatatagctgtttttttcacggctaagaggctgatggcaaagtggacaggaaaaagacatgacaactccggcaggatactaaaggccgcaagtgtaacgcgaatcacgcggcgggcaaatatccgaacgccaggagcgaagataaagcatagtaaaaagcctcgcattcgacgaggctttatagcgagattgaagcgtattcacacttcagatcagtggattcgatcagatagctgttacgttaacagctgccggacctttctggccgtcctgaatttcgaactcaacgttctgaccttcagccagagttttgaagccattaccctggatagcggagaagtgtacgaacacatctttgctgccatcagccggagtaatgaagccaaaacctttagactcgttgaaccacttaacctgacctttaatctttgccatttgaaaaattccttagattgttttcttcgcccgcaggcataacatagataaaacactcacattactgcaactggcaccaatataaggctcggcagagaagcggtattcaacgtcaacgtgtttactcaggacttctttactgaaaatgccacacataaacagaactgtacctcgtttaacccgaaatctgttatcacatacaacgttaattatggcaagccatttttaaacatgtctcgatcagacgcacaaatctcgatacgtcttccactttttttgcacacttatgcaacggaatacgcgccgatatatcattgtgcttaaccttgccagttcaggcagatacttaaactggcgtattttctaacatagttcaataagttcagttgttccaggccagtgggagaagttattacatagtgcgtgcaatatcacattttttgctatgcaatgaataaaaagttatatcactttttctcataaaacagtcagttaacggctattaattaccctaaagagaagtcaatccccaaagggattgtaaatttaaaataagaaaaattgatgaatgagcaaaaaaatcaagagagaaacgtttcgctaataaataataccacgcttaatcacaaatccgatgtaaacatcctaataaattaatggggtaaatatctttttctgatatcccgttacgcaaataaataatatgataattatttgaagtcagaccagagttttaatttgaagcagttgcaccatgacagtgcgtataatcaggatgaattgagtaacccttcaacgacggggttactcaagattgaggaaggattatcgttcggcgaccagacgaataatatcttcgtcttcaacgcttttttgactctcaacggtctttttatctgctttctctggttcgtttgcttcgcacaaacgacgtaacagtgcattttgacgtttttgctgatccagcaacgcctcaagcagttcaatctgttcgttagtccgactactggcacgattgataaaaaaccacaagatgagcccgataagaagaaccaccacgcttacaaccaaagacgcaatgttcatcacgccactatttacaacttcgttcatttcaccacctctgagtagaggcgctattctaccactgctggagaggaagaaaatctagtgctgaaaaaatgatatcaccacgggataaactggttaatggcacaaattccgctgaaaaattgtacatcctgatcgcacatcatgttgaatacctgcgcccaaagcagcaagcaagccaacaccacgacaaccagaacgacccatcgaaactttttcactccaatctccgtttcacctaccttatgtcattaaactagcatgcgttagttaaacagcgcctaactatgtcgatattcgtgctttttcggaatgagtcgcttgcttcagcgcatattgccgctacgattaagcgaacataaaaagagaagaggttgtaatgcgattcatcattcgcacagttatgctgatagcactggtatggataggattattactcagcggatatggcgttttgattggaagcaaagagaatgccgcaggattaggtttgcaatgtacctatctgactgccagaggcaccagcacggtacaatacttgcacactaaaagtggttttttggggataacagattgcccgctgttacgcaaaagcaatatcgtggtcgataatggttaagggcaataaataaccagattctcactcctgagtaaaatactcttatagcaagcgcgtttaatataacgccaccttcaactttatttttctcatgctaaataaagaacctgtctgtttgatattccgacaggttcttactctcatcagaacggatagtcgtgataacccatttgggcagaaattttgcgcgctgcggtatgcaacattgcgacatattcctgtaaacgctcttcagagaaacgcaacgtcgggaaggagatgctcaaaccggcaatgaccacgccaaagcgatcaaataccggtaccgcaatgcatcgcagcccttcttcctgctcttcattatcttcgccatacccctgctcgcgcacctggtccagaacgggtaataacgcttctgtactggtgatggtccgctcggtactgcgtttatactccacgccctcaagaatttgcttcacttcatcgcgatcgcgccatgccagcagtaccttaccaatcgcggtgctgtacagcggattacgacgcccaatccgactatacatgcgcaaattgtacatagagtcaattttgtgaatgtaaacaatactgtcttcgtccagtgcgccgaggtggatagtttctttggtcaggcgggagagctcacgcatctggatatctgcgctacgaattaaatcgacgttttgtaacgcgcgagcgcccagttcaaacaatttcagggtcagggaatatttctcgctctccccttcctgcgccacataacctaaggttttcatggtctgtaaaaagcgataaacggtgcttttactcatcatgacgcgctggctcagctcggttatccctatttcgcgctcttcacccagcgcctgcaaaatgccaaaaacttttagcacggaagatacagaatcaggctgtttatccagatctgcgttagccatttatcacctcattgcgagtgttttataaaaatcagaactgttttttattataatttcgcaccagggtggtcgcaatccatcttttgccggttagttacaattctgcgacatccaccgtgaatatcagtgctagaatcatacccctgttgattattcaccaaagatataaaattcctatgccaaaagttcaggccgacggcctgccattgccccagcgatacggtgcgatattaaccattgtgattggtattagcatggccgtccttgacggcgcaatcgccaacgtcgccctgccaacaatcgccacggaccttcatgccacgccagccagttccatctgggtagtgaacgcctatcaaatcgccattgtcatctccctgctcagctttagctttctgggcgatatgtttggctatcgacgtatttataaatgcggtctggtcgtttttctgttgtctagtctgttctgcgccctttctgatagcctgcaaatgctcacccttgcgcgtgtcatacaaggtttcggcggtgcagcgttgatgagcgttaataccgcacttatccgcctgatctatccacaacgttttctgggtagagggatgggcataaacagctttattgttgccgtctcttctgctgccgggccgacaattgctgcagcaatcctctccatcgcatcctggaaatggttatttttaatcaacgtaccgttaggtattatcgccctgcttctggcgatgcgttttctgccacccaatggttctcgcgccagtaaaccccgtttcgacctgcccagcgccgtgatgaacgcgttaaccttcggcctgcttatcactgcgttgagtggtttcgctcaggggcaaagcctgacgttaattgctgcggaactggtggtaatggttgttgttggtattttctttattcgccgccagctttctcttcccgtaccgctgctaccggtggatttactgcgtatcccgctgtttagtctttctatttgcacatctgtttgctctttctgcgcacaaatgctggcaatggtttccctgcccttttacctgcaaaccgtgctcgggcgtagtgaagtcgaaacaggtttacttctgacaccgtggccgttagcaacgatggtgatggctccgctggcaggctatttgattgaacgcgtacatgcaggattgctgggggctttagggttgttcatcatggctgcggggcttttttccctggttctgctgcccgcgagtcctgcggatatcaatattatctggccgatgatcttatgtggtgctggatttggcttattccagagtcccaataaccacaccattattacctccgcgcctcgcgaacgtagcggtggagccagtggcatgttaggaacggctcgtctactgggtcagagtagcggcgcggcgctggtggcgctgatgctaaatcagtttggagataatggtacacacgtcagcctgatggctgcggctattctggcagtgattgctgcctgtgtcagtggtttacgtatcactcagccacgatccagggcataaaaaaagcgcgtcgatcaggacgcgctttttagtatttacttcatattacttcaggtattcacccgtacgcagagcttcaattcgtttatccagcggcgggtgggtcatgaacaactcactgaggcttttgctcttaccgttaatgcagagagccatcatgctggttgcttcttgcggttcatagctggttttcaggcgctgcagcgcggcaatcattttctcgcgaccaaccagttttgcgctaccggcatcagcatggaattcacgatgacggctgaaccacatggtgataatgctcgccagaataccaaacaccagttccagaaccgttgcaaccgcaaagtagatcagcgggttgccgttgctctcttcaccttcatcacgatttccgcccataaaacccgcggcaagctgcgccagaatacgggaaataaagataacgaaggtgttcaccacgccctgaatcagcgtcatggtgaccatatcaccattggcgatgtggctgatttcgtgagcaattaccgcctcggcttcatccgggctcatgttctgcagcaaaccggtgctgacagcaaccagagaggcatcacggcgcgcaccggttgcaaaagcgttgatgtccggcgcatggtagatagccacttgcggcatagcgatccccgcctgacgagcctgggttgctacagtattgaccagccaacgttccctttcgttacgcggttgctcgatcacttccccgccaacagatcgtaatgccatccatttggacatcagaaggctaacgaaggaaccaccaaaaccgaacagcaaggccatgatcatcagcccctgaacgctgctgctctgtatccctgtcaggctcagtaccagcccgaaaacgaccattacggccaggttcgttagcaggaagagcgcgattcgcatcataattttctttttacctcagtttaacaaaacgcaatatgcgatacccacatcgtatgggttacgcgactattttcaagtctggatagtgcgtaagtcaccagaaagacacaactttacattttgtagcatctgatttacggcatcttgtcgctgttaaaaaatcaggcacaatttcttgtgcctgattgatattacttgacgggagcgggttgttccgcgggtctggctttttcaagcttcgccagatcgagtgcgatattcaccgtctcatccagataaggatccggctcctggtaatctttcggtagatcatccagtttcttcaactccggtttaccttcgcgtttaaagcgttcgttcaaacgcgccagacgcgtcgcatcatcttcattattctctttctcacgcacagcgtaattcagagaaacgatattgcgcttgtccttcatagcgttgaagcgcgcgatatccttcatgatgttctggaactcaggatctttcgcgatacgcgcattatgttccttcagcagctccggttcaaaggccgttaaatctccacttttcacataagtcgcggcatcaatgctatcccacggcagcgcgttatcttcgaatttctcacccgtttccgtttcttcattacccgtcggcatgatgatgtctggcgttacgcctttacgttgcgtactgccgccgttaacgcgatagaatttctggatcgtgtactgcacagaacccagcgctggccattcaggacgtaacatctgatcgtaaatacggttcaaactacggtattgctgaacggtgcctttaccaaacgtcggttcacccacaaccagcgcacgaccgtaatcctgcattgccgcggcaaagatttcactagcgctagcactgaagcggtcaaccagcaccaccagcgggcctttatagaaaacctgtccgtcggtatcgctatcttcacgaaccttgccgttgttatcgcggacctgaacaatgggacccgcaggaataaacagaccggagaggcttacggcttcagttaacgccccaccgccattgctacgcaggtcgatgatgacgctgctgacattctgtttttccagtttctgcagttgcactttgacatcgtctgtcaaacccacatagaagcccggaatatccagcacgccgactttctctttaccgacggtcttcacgctcattttaaccgcgcggtcttcgagacgaatacgttcacgggtcaacgttacagtacgggtcttggtccctttaccagcaggtaaaatttccagacgaactttactgcccttcggccctttaattaaggcaaccacatcatcaagacgccagccaatcacgtcaaccatcggcttgcctgtttgaccaacaccgacaattttgtcaccaacgctgatagctttactcttcgctgccggaccacctgccaccatgctattgataacggtgtagtcatcatccatttgcagcactgcgccaataccttccaggctcaaactcatttcagtgttgaactgttcggtattacgcggggaaagatagttggtatgcgggtcgatttcacgcgcaaacgccgtcattgccaggctgaaaacatcttcgctgttggtttgcgccagacgacgaatggcaaatttgtagcggcgagtcagggtttcacgaatttctttatccgtttttcctgtcagcttcaggcttaactcgtcgaatttgactttactgtcccacagcgcgttcaactcagcctcgtttttcggccagggcgctttgctgcggtcaaggttataagtgtcgttgccggtgaaatccatcggcttttccagtacgctcaaagcgtactggtaacgctcaaaacggcgcttttgcgccagattgtagagatcgtagaaaacgtcgagtttgccactacgcagttcatcgcctaactcggttttctttttcgcgaactgttcaacatcgcttgccagcagcacgttgtggctgtaatcgagcagattcaggtagcggtcaaagattttggcgctaaatgcctgatcgaggtcgaactggcgataatgagaacgggtgaagcggctcgttacgcgctcacttaccgtcgcatgctgcgtctcttcctttaataccggaatttgatcagcacgcgtgatatcttctacagcgaaggtctggcctgctattgcaagcaggccagctaacgcggtaagcctaaaaaacatgttcatgcctggcccggcctccgtttcagaacaccaggtgttctgcgcgcacaatcaaagacataccgctattcagctggacgcggacgccgtctttggtgatttctaatacggtggcatccatcgcgttttgacccgctttcaccttcagggcttgtccgacagtcagagcactaatgtcagaaaccggggtgtgctgttcttcgcgaggtgcttttactgtttttggcgctttctctaccggcttttgcgcacgaggtttacgttcagcgccttctttgcggcgtggcgtagtcggacgtggcttgcgttcgcggcgcggtgcgtcttctttctcaccagcagttgcggcagcttcgcgttttttcgcttgctgttcagcacgctgtgcctgaacacgcgctttcgcttcttcaagctgcttgcgagcatgctctacatgttgctcgtccagctcaccgcatgggttgccgtcaagatcgacacgcgttgcgccgggtttaacaccgtaaagataacgccagctgctagtgtagagacgtaaagcggatcgcaattgcgttttgctcaggttcatttccccagcaacacgatcgaccaaatcctgaaaaataccgattttcagcggacgcgcttcaccttccgcactgaaacagtggggaaaacgttcggccagaaacgcgattacttctttactgctattcaacttaggttgattttccatgaaatttcctgattacaacggacgtagccaacaagcgcaggcatgaacaggcgtcattataatgacgctatcagtaaatgctacgttatccgttgattatcctgcgacgctcgcaaagaattttttgtaatccgtcgttgcaagcactttttcaagctgtgccacaagctgacgtaagccttgctcgtcctcgtctgtaaagcgaccgaagacggtactatcgatgtcgagaacaccaataatctgatttttcaccaccagcggcagaacaatttcagaattactcgccgcatcacaggcaatatgcccgtcaaacacatgaacatcctcgatacgctgcacttgattgcgggcaaccgcagtgccgcacacgccgcgcccgacgggtatccggacacaggcaattttgccctgaaatggtccgagtaccagtgtatcgtcctcaagcaaataaaaacctgcccagtttatgtcagtgagacgctcatataacaacgcactggtgttcgcaagcgttgccagaaaactggtttctcccgccatcagcgcgttaaagtcgcgatttaaatccgcgtaaaattctgttttgttcattatataatcacttggttgtcttacctggatctgccagcctattaaaataagcattaaatgcgttaatgctcaagatcattcccatcatgggttaagattaatgttaattcttattacatttggcacgtcatggctcttaacacaccacaaattacgccgacaaaaaagataacagtgagggcaatcggcgaggaactgccgcgtggtgattaccaacgttgcccgcaatgtgacatgctgtttagcctgcccgagataaattctcatcaaagtgcctattgtccgcgctgtcaggcaaaaattcgtgacgggcgcgactggagcctaacgcgcctggcggcaatggccttcaccatgctgttgcttatgccgtttgcctggggcgaaccgctgttgcatatctggctgttaggcattcgtattgacgccaacgttatgcaaggcatctggcaaatgaccaaacagggcgatgcgataacggggagcatggtctttttctgcgttattggtgccccgctcattctggtgacctccatagcttatttatggtttggtaaccgactgggaatgaatttacgtccggtactgctgatgcttgagcgacttaaagagtgggtaatgctcgatatctacctggtcggcattggcgttgcttctataaaggtacaggattatgcccatatccaggctggtgtcggcttgttctcttttgtggcgttggtgattttaacgacggtgacgttgagtcatcttaatgtcgaagaactgtgggagcgattttatccgcagcgccccgctacgcgtagggacgagaaacttcgtgtctgtcttgggtgccattttaccggctatccagatcagcgtggtcgctgcccgcgttgccatatcccgctacgcctgcgtcgccgtcatagtctgcaaaaatgctgggcggcgctgttagcgagtatcgttttattgttacctgccaacctgttgcctatttctatcatttatctgaacggaggacggcaggaagatacaattctttccggaattatgagcctggcaagtagcaacattgcggttgcaggaatcgtgtttatcgccagtattctggtaccgtttactaaagtgatcgtcatgttcactttactgttgagcattcattttaaatgccagcaaggtttacgcacacgcattctgttactgcggatggtgacctggattggtcgctggagcatgctcgacctgtttgtcatatctttaaccatgagcctgattaatcgcgatcagatcctcgcttttactatgggaccggctgcgttttatttcggcgcagcggtaattttgactattcttgctgtggaatggctggacagccgcttactttgggatgcacatgagagtggaaacgcccgcttcgacgactgaataaccgcttactttgggatgcacatgagtcaggaaacgcccgctagcacgactgaagcgcagattaaaaataaacgccgtatcagtcctttctggctgctgccgttcatcgcgctaatgattgccagttggctgatttgggacagttatcaggaccggggtaataccgtcaccatcgactttatgagcgcggatggtattgttccaggccgtacgcctgttcgttatcagggcgttgaagtcggaacagtgcaggatatcagcctcagcgacgatcttcgtaagattgaagtcaaggtcagcatcaagtccgatatgaaagatgcgctgcgcgaagagactcagttctggctggtgacgccaaaagcaagcttggcaggtgtctccgggctggacgccctcgtcggtgggaactatatcggcatgatgccgggtaaaggtaaagagcaggatcactttgtcgcactcgatacccaaccgaaatatcggctggacaatggcgatctgatgatccacctgcaagcccccgatctcggtagcctgaacagcggtagtttggtctatttccgcaagatcccggtgggaaaagtctacgactatgccatcaatcccaacaagcaaggcgtggtgattgatgtcctgatcgagcggcgttttaccgatctggtgaaaaaaggtagccgtttctggaacgtttccggcgttgatgccaacgtcagtatcagtggcgcgaaggtgaaactggaaagcctggcggcactggttaacggtgcgattgccttcgatagtccagaagagagcaaacctgccgaggcggaagatacctttggtctgtatgaagatctggcccacagccagcgtggcgtaataataaaactggaactgccgagtggggccggattaaccgccgacagcacgccgttaatgtatcaggggctggaagtcggacagctgactaaactggatttaaatcctggtggtaaagtcacaggggaaatgaccgttgatcccagcgtcgttaccctgcttcgtgaaaatacccgcatcgaattacgcaacccgaaattatcccttagcgatgctaatctcagcgccctgctgaccggcaaaaccttcgagctggtgcccggcgatggcgagccacgcaaagagttcgttgttgtgccaggcgaaaaagcactgctgcatgaacctgatgttctgacgctgaccctgaccgcgccggaaagttacggtattgatgcgggtcagccgctcattcttcacggcgtgcaggtaggccaggttatcgatcgtaaactcaccagcaaaggcgtcacctttaccgtcgccatcgagcctcagcatcgcgaactggtaaaaggcgatagcaaatttgtcgtcaacagccgtgtcgatgtgaaggtggggctggatggcgttgagtttctcggtgccagcgccagtgaatggatcaatggcgggatacgtattctgccgggcgataaaggtgagatgaaagccagctatccactgtatgccaatttggaaaaagcgctggagaacagccttagcgatttacccaccacaaccgtgagtttgagtgcagagacgctgccggatgtgcaggcaggaagcgtagtgctgtaccgtaaatttgaagttggtgaagtgattaccgtgcgtccgcgagctaacgcgtttgatatcgatctgcatattaagccggagtatcgcaaccttctgaccagcaatagcgtgttctgggcagaaggcggggcgaaagttcagctgaatggtagtggtctgaccgtacaggcatccccgctctccagagcattaaagggagccattagcttcgacaacctcagcggtgccagcgccagtcagcgtaaaggcgataagcgtattctgtatgcttccgaaacagcggcccgtgcggttggcgggcagattacgcttcacgctttcgatgccggaaaactggcggtcgggatgccaattcgctatctcggtattgatatcgggcaaatccagacgctggatctgattaccgcacgcaatgaagtacaggcaaaggcggtactttacccggaatatgtccagacctttgctcgcggtggtacgcgcttcagtgtggtcacaccgcaaattagcgcagctggcgttgagcatcttgatactatcctccagccgtatatcaacgtcgaaccaggccggggcaatcctcgccgcgactttgaattacaagaggccaccattactgatagccgttacctggatggcttaagcattattgttgaagcgccggaagccggtagcttaggcatcggtacgcctgtgctgttccgtggtctggaagtcggtacggttacaggaatgacgctggggacattgagtgatcgcgtgatgattgcgatgcgcatcagtaaacgctatcaacacctggtgcgtaacaattccgtcttctggttggcaagcggttacagtctggactttggtctgacgggcggcgtagtgaaaaccggcacctttaaccagtttatccgtggcggcatcgccttcgccacgcctccgggtacgccactggcaccgaaagcccaggaaggcaaacacttcctgttgcaggaaagtgaaccgaaagagtggcgtgaatggggaactgcgcttcccaaataatgcccactgctccggcgtgcctgcgccggagcgtttatgctaaactgcgcgcctgtttttttgccagtggtacatgctcgtggcccaacacaccgtttatttcccggacgcctttctgacacaaatgcgcgaagcgatgcctagcacgctcagttttgatgattttcttgccgcctgtcagcgcccgttgcgccgcagcattcgcgttaatacgctgaaaatctccgttgctgatttcctgcaattaaccgctccttatggctggacgcttacgccaattccgtggtgtgaagaaggtttctggattgaacgcgacaatgaagatgcattgccattgggtagtaccgccgagcatttaagtggcctgttttatattcaggaagccagtagtatgttgcctgttgccgccttgtttgctgacggtaatgcaccacagcgggtgatggatgtcgctgccgcgcctggctccaaaacgacgcaaatttccgcgcggatgaataacgaaggggcaatccttgccaatgagttttccgccagtcgggtaaaagtgttacatgccaatatcagccgctgtggtatcagtaatgttgcgctcacacattttgatggccgcgtgtttggtgcggcagtgccagaaatgttcgatgccattttgctggacgctccctgctctggcgaaggcgtggtgcgtaaagatcccgatgcgctaaaaaactggagtccagaaagcaatcaggaaatcgcagctacacaacgggagcttatcgacagcgcctttcatgcattacgtcctggtggtacgctggtttacagcacctgtaccttaaaccaggaagaaaacgaagccgtttgcctgtggctgaaagagacttaccccgacgcagtagagtttttaccacttggcgatctcttccctggtgcaaacaaagcgctgaccgaagaaggctttttgcatgttttcccacaaatttacgactgcgaaggcttcttcgttgctcgtctgcgtaaaactcaggcgattcccgccttacccgcccccaaatacaaagtcggtaattttccgttcagcccggtgaaagatcgcgaagctggacaaattcgtcaggcggctacaggtgttggcttaaactgggatgaaaacctgcgcctctggcagcgtgacaaagaactgtggttgttcccggtgggcattgaagccctgatcggtaaagtccgattttctcggttggggattaaacttgccgagacgcacaacaaaggttatcgctggcagcatgaagcggttattgctcttgccagtcccgataatatgaatgcattcgagctgacaccgcaggaagcggaggagtggtatcgcgggcgcgatgtttacccgcaagccgcgccagtggcggatgatgtattggttactttccagcatcaaccgattggtttagccaaacggattggtagccgattgaaaaacagctatccgcgtgaactggtgcgcgatgggaaactttttaccggtaacgcctgacagcgcacaaaaaaagcgcactttttgactggcacattcggctgcctcaactaggctgaaaaatggtgcgatcggactggtcgtaccacaatcggcagctaaatggagagcacgaagatgaaaaccagtgtgcgcataggcgcttttgaaatcgacgacggcgaattacacggtgaaagcccaggtgatcgaacgttaaccattccttgtaaatctgaccccgatttatgtatgcaactggatgcctgggatgctgaaaccagtatccctgccctgctaaatggcgaacactctgtcctttaccgtacccgttacgatcaacaatctgatgcctggattatgcgtcttgcctgatccaaaaagaacccgtcggcatggcgggttatttgtcctggttattcccccgttgtaaaatctctcctaaacttaacggtacggcaccacacttcggggatgaaatgttcgcgctggtactttttgtttgctacctggatggcggttgtgaagatattgttgtggatgtctacaacacggaacagcagtgtctttattctatgagcgatcaacggatccgccagggcggttgttttccgattgaggattttatagatggtttctggcgacctgcacaggagtacggtgatttttaattattgcaattgcacaagagtcagttcgcccccaaagacagcaccggtatcaatataatgcaggttgccaatatccacgcgatgtcgcaacggtgtatgaccaaaccagaaatgatcagcacctgtaattccctgccctttttggcgttcacctaatcggctgcggctccacaagacctgatgcaaatcaacgtccttttgccattcataaacatcatctggataatcggcatgagcaataatatgcttgccggtgcgactgtgtacttcaagaataaagggcaaatgctgacatttttccagcgccgttttcgcttgtttctgttgattatctgccagcgcaataaaccagtcgccgccattcatcaaccacaaagacatctgctgggatgccagcgcatccatcgccatctgttcatgattgcctcttaccgcacaaacccaatgttgttccagtaactgcagacaacgtaaactttgcggcccacgatcgataacgtctcccacactgataagtaaatctcgccacggatcaaaacgacaatgccataatttgcggcgcaactgctcaagacaaccgtgtatatcgccagaaagccagatatgtcgccattgatgacccgcaattctctgataaacgggcgcaggctgtttcatcaatattttcctcccgcgctaaagatcacataatcttaacaagaatgttaaaaaacgctggactcagacagtagagtgtgtgttatggttgactataaagtcagcgaaggaaatgcttctggcttttaacagataaaaagagaccgaacacgattcctgtattcggtccagggaaatggctcttgggagagagccgtgcgctaaaagttggcattaatgcaggcttagttgccttgccctttaagaatagatgacgacgccaggttttccagtttgcgtgcaaaatggtcaataaaaagcgtggtggtcatcagctgaaatgttaaaaaccgcccgttctggtgaaagaactgaggcggtttttttattggaaatcaaaaggctattttaggtaattaacagagtttttcagctcgttctataaacggtgccagactcattttttcgccgggattgttaggatcatcaatctgaatcacgctaatgggttgggcattggtcttcccactggcaacttccttttgtgcgatatcgtttaaaggatactgcacgagggtactcggattaataacatacaaagcattacccggtcggcaagtcagcatcacctcttcgcgattaaacgcccatttgtctttacccacttcaaaacgactgacggtaatcacctgcggtgcagccagcgccgctgcagaactggtgagtaacagaaacgccagaatactttttttcatcattttcgtaatccatcaaaaaggttcgagagtcgcaagcaggctgatgatcaccagcactaccgcacctatcgcccattcgagtttagtcatccacacaaaccagggtgccgcacgatcttcatcctgcctcatgcgcggtacaagaacataacgattagccagcgcaatgaccaccataatcatcaccaggatggctttgagcaataagagttggccccagtaagtcgtaagcgtggggggaaatccggtaatcaacaatgcattaagcacgccgcttgccagtacgccgatcaccgcaaaatgcccgcaccaggaaaaacgcatcagcgcctgaatagcctggtgtcgccaacggcctttgatgagttgcatacaccagagcaccggcagtaatcccccaaaccacgccgccgcacaaatcaggtgaatcgcgtgattagtctgatggattttcgctgttaccccttcattcagcgtcgcatgccccactcccgccagcagaataaattgcgcggtagtgagcataaacagcaaacgtggcatattccgcggttgcataagggcgacgatcaacgttacgagggcgagaacaatttgccataaccagatgccaccaaactgcgtttgcaaaacagcctgccaaatgtttgggctaaatacatctgtccatcccgttcccatcaacccgccctgaacggcgagcattgcagtggcactgatcaaactccagacggcagcgtgctgttgtaaacgcagaaaacgcttcgccagcaagcgacgaatcgtcaagggggccagccaggcaccgtacattgcgaagccaaaaaccagcatcaggctggtgaaatggataaatcgcagcgcgatccaggtaaacgccagcatgatttatttcacgctaaaggtgtagtgtcctttcgttttatgcccgtccacgctaacaacatgccagtcaacggtgtaggttccgggtttcaggctatcggccagtggaacaatcagttgcttttggtcctgctcatttcgcttcgccggtaatgttttaatattttcgttttttggccccgtgatttttgcaccactgaatcctgtttcaacaccttcgctgaagtttaaagtgattgcctgcggtgcagctgtcacttgcgcgtttgccgcaggatactgatgcgttaaatgcgcatgtgcccagacggaaggtgtcaccaagctagtggtcaggattgccagcgcgtagcgaagggagcgtgcagtactagccatattatctattcctttttgtaataacttttttacagagcataaccttgtctaatgtctgagtcgaggatcatcaattccggcttgccatcctggctcactcttagtaacttttgcccgcgaatgatgaggagattaagaatgctgaagaatctggctaaactggatcaaacagaaatggataaagtgaatgtcgatttggcggcggccggggtggcatttaaagaacgctacaatatgccggtgatcgctgaagcggttgaacgtgaacagcctgaacatttgcgcagctggtttcgcgagcggcttattgcccaccgtttggctagcgtcaatctgagtcgtttaccttacgagcccaaacttaaataaaacttatacagagttacactttcttacataacgcctgctaaattatgagtattttctaaaccgcactcataatttgcagtcattttgaaaaggaagtcattatgagcttctggaaagttgcagcagcgcaatatgagcctcgtaaaaccagtctcaccgaacaggtagctcatcatctggagtttgtgagggccgccgccaggcaacaatgtcagctgttagtttttccaagcctttctttactggggtgtgattatagccgacgtgcccttcctgccccacccgatctcagtctgttagacccgctttgttatgccgcaacgacctggcgaatgaccatcattgccggccttcccgttgaatataacgatcgctttattcgtggaattgcggtgttcgcaccgtggcgaaaaacgcctgggatctaccatcagagtcatggtgcatgtctgggccgtcgttccagaaccatcacggtggtcgatgaacaaccgcaaggtatggatatggacccgacctgtagtctgtttactacagggcaatgtctgggagaacccgacctgctggcgagcgcccgtcgcttacaattttttagtcatcagtacagcattgccgtgctgatggcaaatgcccgtggtaacagtgcactatgggatgaatatggtcgtctcatcgttcgcgccgatcgtggtagtttattgttagtcggtcagcgtagtagtcagggttggcaaggcgatatcattccattacgctaagctttttcggcctggagcatgccatgttgcgcattatcgatacagaaacctgcggtttgcagggagggatcgttgagattgcctctgttgatgtcattgacggaaaaatcgtcaaccccatgagccacctggtgcgccccgatcgtcctattagtccacaagcgatggcgattcatcgcatcaccgaagccatggtcgccgataaaccgtggattgaagatgtgatcccacactattacggtagtgaatggtatgtcgcgcataacgccagctttgaccgccgcgtactgcctgagatgcccggtgagtggatttgcactatgaaactggcccgtcgtttgtggcctgggatcaagtacagcaatatggcgttatataaaacacgcaagctcaatgtacagacgccgccgggcctgcatcatcaccgcgcgttgtatgactgttatatcaccgccgcgttgcttatcgatattatgaacacctccggctggacggcagaacagatggccgatatcaccggacgtccgagcttgatgacgaccttcacctttggcaaataccgtggcaaagcggtttccgacgttgccgaacgcgatccgggctatctgcgctggttatttaataacctggacagcatgagcccggagctgcgtttaacactgaaacattatctggaaaatacttaatccgcaggcgtagcgggtaatgttccctgcgccagcgcgaccagaaaagcatattccatcgctacgccttcgtagcttttaaagcgaccagatttaccgccatggccactgtccatgtcggtacagagcaataaaagatggtcatcggttttcagctcgcgcaatttagcgacccattttgccggttcccaatattgcacctgagaatcgtgcaaaccggtcgttaccagtaaatgcggataagcctgtgcggtgacgttgtcatacgggctgtagcttttcatgtactcgtaatattgcggatcctgcgggttaccccactcttcaaactcaccagtggtaagaggaatactttcatcaagcatcgttgttacaacatcaacaaacggtacctgggcgataacgccgtggaataattccgggcgttgattaattgcaacgcccatcaacatgccccccgcactcccgcccatcgcataacaaaggctaggagagccatagcccagttttaacaatgcatcgcaggcatcaagataatcattaaacgtatttttcttcttcagaaattttccgtcttcgtaccattgttgccccagctcaccaccgccgcgaacatggacaatggcgtagacaaagccacgatctaacaaactcaagcggctaaaactgaaatcggcatcaatacttgcgccgtaagaaccatagccatacaccagcaacgggttgtgtcctttgcgaaaatgtttgcgatggtagaccaagctaaccggaacttcgacgccatcacgggcgactatccacaggtgttcactgcggtaattcgccgcataaaaaccaggaacttccgtttgttttaatacacgacgctcaccggtatccatatccagttcaaacaaagtgtctggtgtagtcatggaagaataaccataacgcaatcgcgcggtttcaggttctggattgtaggcaatccaggtcacataggccggatcatcaaaggcaataccaatgacttcccgggtcttgcggttaatttggcgcaaactggttaacccgcgctgacgctcttcaaccaccagccagtcggtaaacagcgtaaacccttccagcatgatgttttcgcgtggcggaattaactcttcccactgttgctcatcacgcatacgggtacggtataagccaaagtttttgccgtggcggttggaacgcagataaaaacgatgctggtagtgatcaaggctgtattcgtgatctttgcggcgcggcagaaaaacaaacggctcggcatcggccatttccgcgtccagcaggcgaacttcactggtggtggcgctggccaaatgaatgactacatagtgcttgctggtcgttttatgcaggctgacgtaataggtatcgtctttttcttcgtagatcagtttatcttggcttgctggcgtaccgatggcgtgacgccagacctgataaggcagcagcgtcaccggatgcttgcgaacatagtagaaaatccaggagtcatttgcccagacaaagctgggttcaacgttatccagcagttccgggtaccagttaccagtttccagattacgaaaacgaatgccgtactggcgtcgggaaagaaaatcttctgccagcgccataatggtgttatcgggcgtaatcgccattccgcccatgctataaaactcactatgagctgcgcgcttattggcatcgagcaatgtttcccactcatcccactcttcactgaatgcgctttgacgctggtagatagcatattcacagcctggttcataaatatgccgatagcggtagccatttttgatgtagggcgcagaaacttctcgttgcggaatgcggtcgatgatttcctttaagatgcgatcctgcaaggcttgttgactggccatcacccgatgaccgtaactattttcttgttgcaggtagtccaggacttctggctgagaacgcgtatcgtcccgcagccagtagtaattatcgatgcgcgtatcgccatgaagcgtcatggcgtggggaatgcgggcggcttttggtagcatgttattgttctttctggttgaaacatcttataagggtggcaaaactcaccggggatgcaagcgaaacaggggagtcattgcttagatgatgacaggtaatggcgcggatatcgaatgttatgcagacagagaaaatcagcctgttcaaatggctgtgcgattctggatagcccgaaatagtcaacttcaggctatccagagagcggaattattccgccaaagtgcgtttttgctgttcgagatcgcgttcaatgccgtcacgaacatcctgggggattttcagcgcgtcacccagtgcattcaggtaactgcgttccataaaatggtcaatatcaatagccgcgcaactcaggaaatagatttccagcgcctcttcttcattgcggaccccggtagccaggcgttgtggatccagcggttgttcgattgcctgctcaatgagtacacgcccctgctcttccacgccggctccacgcaattgctggtcgattgccgcacgttctttggcatcaatatgaccatcacttttagcggcaaagaccagcgcaaggatcaaacgtgctgtacgctcatccagcggcgtactttgcgcgccaaactgcggttcgtcctgatgcgccgcgcgaattttatctttgtatttattccacagcaccgtacccgctaccgctccgccgccaaccagtaacgcgttggtgccatatttcgtaagaagtttacgtgcacttttatttgcgaccagcagcccagccagtccgcctaatgcgcctggcactaacagtttgaccaatccctgatccgcagagctggaggtagaagaactgctttgcccaagcagggattgcagttgatttaaccagttagccatatttgctcctcaataaccatttttagtgcctgtagcatagcggatgaggatgtcagaaaatgtatatcgagacaaaagatgcgcaaataagcggggcggtaggccgttattcaaagaaattcgcgccaggtaaggtatttactgtatatcaggtgataagggtattttaggtgaaagtagtttgtcgttttgagtggcattgtttgatgctgattgcccgatgcgacgctgttgcgtcttctcaggcctacgattgtggtgcgttctggggcggacaaggcactcgcgccgcatccgccaacagtcaatcgaattatcagaagccattaacgccgctgatattccgccattcccgctttgcagtccacgctgacctggtaatgaatatcggcacttttaccacgcacggttagcggtacactccatttatcatctttaccctgaatgtcctgcaaactgacccaagccacgggatcggcctgaccgacaattttttgatcatctgcccaacgcgccacgcgattttgttgataatcacgttttacgctcgcggcaattccggcagcatccagatcttcacactttgggaaagtgacgctcttgctggtttcattattggcagcgaaaacacttgcgcaggcagaaaccaacaacagccctaaaaacgcccctctttttttcatgtttttctccatagcacaatgattcaggagaaagcatggtacaaattgtcaggagcgcaagttgcttcaggccgcgtgactggcatcttcctcttcggattcagcaccgacgacctgtggggacggtaatttgccggttttcagaatggtgctcagcacatctttttgttctgccagccataggctaagggcttcacgttgctcgtcttccatttgcactggagaatttgtcagccaggtgtcaagcagatccgccgtatcaagcattttgtcataagcatcggcttcctttttgctggtaaagctcattttctcttcgccctcacgaatgactacgtatttaacttcaaccgccatttgcagcctctcataataactgtgattttatacagtatatttcttttcggttgagaaatcaacatcagcaataaagacacacgcaaacgttttcgtttatactgcgcgcggaattaatcaggggatattcgttatgacgttattaggcactgcgctgcgtccggcagcaactcgcgtgatgttattaggctccggtgaactgggtaaagaagtggcaatcgagtgtcagcgtctcggcgtagaggtgattgccgtcgatcgctatgccgacgcaccagccatgcatgtcgcgcatcgctcccatgtcattaatatgcttgatggtgatgcattacgccgtgtggttgaactggaaaaaccacattatatcgtgccggagatcgaagctattgccaccgatatgctgatccaacttgaagaggaaggactgaatgttgtcccctgcgctcgcgcaacgaaattaacgatgaatcgcgagggtatccgtcgcctggcggcagaagagctgcagctgcccacttccacttatcgttttgccgatagcgaaagccttttccgcgaggcggttgctgacattggctatccctgcattgtaaaaccggtgatgagctcttccggcaaggggcagacgtttattcgttctgcagagcaacttgctcaggcatggaagtacgctcagcaaggcggtcgcgccggagcgggccgcgtaattgttgaaggcgtcgttaagtttgacttcgaaattaccctgctaaccgtcagcgcggtggatggcgtccatttctgtgcaccagtaggtcatcgccaggaagatggcgactaccgtgaatcctggcaaccacagcaaatgagcccgcttgcccttgaacgtgcgcaggagattgcccgtaaagtggtgctggcactgggcggttatgggttgtttggtgtcgagctatttgtctgtggtgatgaggtgattttcagtgaggtctcccctcgtccacatgataccgggatggtgacgttaatttctcaagatctcagtgagtttgccctgcatgtacgtgccttcctcggacttccggttggcgggatccgtcagtatggtcctgcagcttctgccgttattctgccacaactgaccagtcagaatgtcacgtttgataatgtgcagaatgccgtaggcgcagatttgcagattcgtttatttggtaagccggaaattgatggcagccgtcgtctgggggtggcactggctactgcagagagtgttgttgacgccattgaacgcgcgaagcacgccgccggacaggtaaaagtacagggttaaacccggcaaaaaaacgctacaaaaatgcccgatcctcgatcgggcattttgacttttacagcttagcgccttctacagcttcacgcgccagcttagtaatgcggtcgtaatcgcccgcttccagcgcatctgccggaaccagccaggaaccaccgatgcacagcacgcttttcagcgccaggtagtcacggtagttagccggagaaataccacccgtcgggcagaaacggacctgggagaacggacccgcgatcgcctgcagggctttcacgccgccgttagcttcagccgggaagaatttgaactctttcaaaccgtagtccatacccagcatcagttcggaaacagtgctgatccccggaatcagaggaatagtcccttcggtagcagctttcagcagcggctcggtcagacccgggctaattgcgaactgtgcacccgcttcagtgacttctgccagctgctgtggattcagcaccgtaccggcacccacaatcgcttcaggcacttctttggcgatagcacggatagcgtcaactgcacactcggtacgcagagtcacttccagaacgcgcaccccaccagcaaccaacgcttttgccatcggcaccgcgtgttccagtttttttaccacgataaccggtacaaccgggccggtggtcaggatactttctgcacttgttttccagtttttcatcagagttttctctcgcctgattacaaatttgtcgtcttaaaaagtgatacaggttgcgccctgttcggcaccggacagtttttcacgcaaggcgctgaataattcacgtcctgttcccacgcgactcgcgctcaggtcaggaatgtgcggttcgcgagcagccagttccgcttcgtctaccagcagcgtcagttcgcctgtctgtccattcacacgaatgatgtccccgtcgcgcacttttgccagcagcccgccatcgtaggcttctggtgttacgtggatagcactcggcactttaccactagcgccggagagtcgtccatcggtaactaacgcaattttgaaacaccggtccaataatacaccaagtggcggcatgagtttatgtaattctggcattccgttcgcttttggcccctgatgacggacaacaacgacacaatcgcggtccagcaaacccgcttcaaaggccggcataacgtcatgctggctttcaaaaacaaccgctggcgcttcaatcacctggttctcaaccggcacggcagaggttttcataaccgcacggcccaggttaccgcttaacacttttgtcccaccatgatgagagaaaggttgttcgaaggaagcgatcacattgctgtcgagacttttttccgccccttcccgccagtccagttcaccattattcagccatggttcaagggtataacgagacagaccaaaacctgccaccgtattgacatcttcatgcagcaggcctgctttgagcagttcacgcaccagaaccggtacgccacctgccgcctggaagtggttaatatcggccggaccgttcgggtagagacgtgccatcagcggtacaacatcagaaaggtcagagaagtcatcccagttaatctgaataccggccgcgcgcgccatcgccaccaggtgcatggtgtggttagtggaaccaccggtcgccagcagtgcaacgataccgttcaccaccactttctcatcgatcatcttaccgatcggcatccattcattaccattaccggtcatgcgtgtaacctgacgcgcagctgcggcggtcaaagcatcgcgcagcggagaatccggatgaacaaaagaagagcctggcaactgcatccccataaactccaccaccatctggttggtgttggcagtaccgtagaaagtacatgttcccggcgcatggtaagacgcggcttcactctccagtaaggccatgcggtccactttaccttcggcataaagctggcgaatacgcactttttctttatttggcaaaccgcttgccatcggtccagacggcacaaacaccgcaggcaaatgaccaaagctcagggctgccatcgtcagacccgggacaatcttgtcgcacacaccgaggaacagagcaccatcaaacatgttatgggacagccccaccgccgcagacatcgctatcacttcgcggcttagcaggctcaattccattccatcctgcccctgggtgacaccatcacacatcgccggaacaccgcccgcaacctgaccaaccgcattcgcttcatgcagggctttacgaatgatttctggatagtgttcataaggctggtgcgcggagagcatgtcgttataggaggtgatgatggcgatattgttacgcaacatgcttttcaaagaggctttgtcttctggctggcaggcagcgaaaccgtgtgccaggttaccgcatgccaactggctacgatgaacggtgctagttttcgcttgttctatccgggcgagataagcagagcgagtctcgcggctacgttcaatgattcgatttgttacgcgtaacaattgtggattcataaaggctcctgaaattgagttgtcagagcaggatgattcacaacgcgtttcattcagaggatttatgactgaaacgcctgtaaccggagctcatagggcaaaaacgtttcagtcagtgtaataaaaaaagcctcgtgggtgaatccgcacgaggcctgaaagtgtaaaaattgttctacaatctgcgcaagatcatgttaccggtaaaataaccataaaggataagcgcagatattactcaaactcattccaggaacgaccatcacgggtaatcatcgccacgctggcaacgggtccccaggttccggcctgatacggtttcggcgcatcattgtccatcgcccacgcctcagtaatggagtctacccatttccaggcttcttccacttcgtcgcgacgtacaaacagtgcctgaataccacgcatggtttccagcagcaaacgttcataggcatccgccagatgcgtctgattaaaggtttcactatagctcagatccagcttggtgatttgcaggttatgtttgtggtcaaggccaggaactttattcagtacctggatatccacgccttcatcaggttgcagacggatagtcagtttattctgcggcagatcctgccagctttctttaaacagattcagttcaggtgttttgaaatagaccacgacttcagaacatttggtcggcagacgtttaccagtacgcaggtagaatggcacaccggcccagcgccagttatcaatgtcgacgcggatcgccacgaaagtttctgtattgctgctcttgttcgcgccctcttcttccagatatcccggcacttttttgccctgggcgaagcccgcagtatattgcccgcgtacggttttttcgcgtacgttggagcggtcgatgcggcgcagagacttcagtactttcactttttcatcgcggatgctgtctgcgctcaggtcagacggcggagacatcgcaatcatgcaaagaatttgcagcaggtggttctggatcatgtcgcgcatctgaccggctttatcaaaatagccccagcgcccttcgatccccacttcttctgccacggtaatctcaacatgatcaatggtgcgattgtcccagttattcacaaacagggagttagcaaaacgcagcgccaacaggttcagcaccgtttctttaccaagatagtggtcgatacggtaaacctggcactcctcgaagtattcgccaacctgatcattgatttcctggctggtcgccaggctcgtccccagcggtttctccatgactacgcgtgccggtttagcattcagttttgcctcgccaagccctttgcaaattgcgccaaaagtgctgggcggcatggcaaagtagttaatggtgatacgatttttttgatccagcatcgcgccgagacggctgaatgcagcagtgtcattgacatcgagattacaaaaatccagacgtgcactcagggtgtcccataaaccttcatcaatggtttctttcatgaaagtttcgagcgcctcgcggacaactttggtatatgccgctttatcccagtcagcacgccctacgccgataatccgggtgtccgggttgagctgaccggctttttccagttgatacagggaaggcagcaatttacgacgcgcaaggtcgcctttcgcgccgaaaatgaccaggtcacaggcctgggctgtttgcgttaccgccatgtcattctccttaagttaactaacccggtacttaagccagggtatacttgtaattttcttacggtgcactgtactgcttttacgagcttgcgaaaactgtaaacgcttatccacccgtgcgattacgggaaaagcgcgcaaagtgcggcaaaactgataaaaaaatcatcgttttccattgggtaaaaatctgacactgatcatgttatgaaaaaaaataacaacttttttatctgcttttgtcattaacacggcacacaggcgtaatatctgacaaaactgcatttcgatttctttcagtgcggaaatcgtcattacccgtgagtctctttacatcatgaatatgctggaaaaaatccagtctcagctggaacatttgagcaaaagtgagcgcaaagttgccgaggtcattctggctagccccgataacgcgatccatagcagtattgctgctatggcactggaagccaatgttagcgaaccgacggtgaatcgtttctgtcgcagcatggacacgcgcggttttcctgattttaaacttcatctggcacagagtctggcgaatggcactccctatgttaatcgcaatgtcaatgaagatgacagcgttgaaagttacacagggaaaatatttgagtccgcaatggcaacgcttgatcatgtccgtcatagtctggataaatctgccatcaaccgcgccgtcgacttgctcactcaggcaaaaaaaatcgcctttttcggattaggctctagtgccgccgttgcccacgatgcgatgaataagttctttcgttttaatgttccggtggtgtactccgatgatatcgtgctgcaacgcatgagttgtatgaattgtagcgacggagacgtggtggtgctgatttctcacactggaagaacaaaaaatctggtcgagctggcgcagctggcacgcgaaaacgacgccatggtgattgccctcacctctgcgggtaccccgctcgcccgggaagcaacgctggcaattaccctcgacgtaccggaagatactgacatttatatgcccatggtttctcgacttgcacagctgaccgtgatagatgtgctggcgacaggatttactttgcgacgcggtgcaaaattcagagataacttgaagcgggtcaaagaagcgctgaaggaaagccgttttgataagcagttacttaatttaagtgacgatcgctaaaaacgactgtcactgtcctaatcttatacgacatccgaatgagattaatttatcgccatcgcggcgttatttcattcggatttcatgttcaagcaacacctggttgtttcagtcaacggagtattacatgtccagaaggcttcgcagaacaaaaatcgttaccacgttaggcccagcaacagatcgcgataataatcttgaaaaagttatcgcggcgggtgccaacgttgtacgtatgaacttttctcacggcagccctgaagatcacaaaatgcgcgcggataaagttcgtgagattgccgcaaaactggggcgtcatgtggctattctgggtgacctccaggggcccaaaatccgtgtatccacctttaaagaaggcaaagttttcctcaatattggggataaattcctgctcgacgccaacctgggtaaaggtgaaggcgacaaagaaaaagtcggtatcgactacaaaggcctgcctgctgacgtcgtgcctggtgacatcctgctgctggacgatggtcgcgtccagttaaaagtactggaagttcagggcatgaaagtgttcaccgaagtcaccgtcggtggtcccctctccaacaataaaggtatcaacaaacttggcggcggtttgagcgctgaagcgctgaccgaaaaagacaaagcagacattaagactgcggcgttgattggcgtagattacctggctgtctccttcccacgctgtggcgaagatctgaactatgcccgtcgcctggcacgcgatgcaggatgtgatgcgaaaattgttgccaaggttgaacgtgcggaagccgtttgcagccaggatgcaatggatgacatcatcctcgcctctgacgtggtaatggttgcacgtggcgacctcggtgtggaaattggcgacccggaactggtcggcattcagaaagcgttgatccgtcgtgcgcgtcagctaaaccgagcggtaatcacggcgacccagatgatggagagtatgattactaacccgatgccgacgcgtgcagaagtcatggacgtagcaaacgccgttctggatggtactgacgctgtgatgctgtctgcagaaactgccgctgggcagtatccgagtgaaaccgttgcagccatggcgcgcgtttgcctgggtgcggaaaaaatcccgagcatcaacgtttctaaacaccgtctggacgttcagttcgacaatgtggaagaagctattgccatgagtgcaatgtacgcagctaaccacctgaaaggcgttacggcgatcatcaccatgaccgaaagcggtcgtaccgcgctgatgacctcccgtatcagctctggtctgccaattttcgccatgagccgccatgaacgtacgctgaacctgactgctctctatcgtggcgttacgccggtgcactttgatagcgctaatgacggcgtagcagctgccagcgaagcggttaatctgctgcgcgataaaggttacttgatgtctggtgacctggtgattgtcacccagggcgacgtgatgagtaccgtgggttctactaataccacgcgtattttaacggtagagtaagtacgttgccggatgcggcgaaaacgccacatccggcctacagttcaatgatagttcaacagatttcgaatattctgaagcaaacttgaacttatcatcaggcgaaggcctctcctcgcgagaggcttttttatttgatgggataaagatctttgcgcttatacggctggatttcgcccggtttgcgagttttcagcaattttagtatccaggtgtattgttctggtcgcggaccaacaaaaatctcgacttcttcattcatccgccgcgcaatcgtatgatcatccgcctctaacagatcatccatcggtgggcgcacctgaatcgtcagacgatgcgtcttgccatcataaatcggaaacagcggtacaacgcgcgcacggcacactttcatcaaacgaccaatcgcgggcaacgtcgctttataggtggcaaagaaatccacaaattcgctgtgctctgggccatgatcctgatcgggtaaataatatccccagtacccctgacgtacgctctggatgaatggtttaataccgtcatttctcgcatgcagacgaccgccaaagcgacgacgcaccgtgttccagacataatcaaaaaccgggttgccctgattatggaacatcgctgccattttctgcccttggctggccatcagcatggcaggaatatcgacggcccaaccgtgcggcaccagaaagataactttctcgttattacgccgcatctcttcgatgatctccagcccttgccagtcaacgcgcggctgaattttctccggcccgcgtattgccaactcagccatcattgccatcgcttgcggcgcggtggcaaacatctcatcaacaatcgcttcgcgttcagcttcactacgttctggaaagcagaggctcagattgattaacgcacgacggcgactgctttttcccagtcgtccggcaaaacgtcccagccgtgccagaatgggatcacggaactttggcggcgttaaagcgatacccgccatcgctgctacgcccagccatgctccccagtagcgcgggtggcgaaaggatttatcaaactcaggaatgtattcgctattattttttttcgtttccatgcttttccagtttcggataaggcaaaaatcaatctggtgatagtgtagcggcgcaacttgccccgcaccaaataaaaaaagccggtactgactgcgtaccggctgcgaatggatgttaattaatcaaaccgtagctgcggcacaatctctttggcctgcgccaggaattcgcgacgatcggagccggtcagcccttcggtacgcggcagttttgccgtcagcgggtttacggcctgctggtttatccatacttcatagtgcagatgcggcccggtactacgtccggtattaccggaaagcgcgatacggtcgccacgtttcaccttctgtcccggtttcaccagaatcttgcgcaagtgcatataacgcgtggtgtagctgcgaccatgacgaatagccacataataacctgctgcgccactgcgtttggcaaccaccacttcaccgtcacccacactaagcactggcgtaccctgcggcatggcgaaatcaacacctctgtgtggtgcaacgcgaccggtcaccggattagtacgacgcgggttaaaattagagctgatacggaactgtttcgccgtcgggaatcgcaagaatcctttcgccagaccagtaccgttacgatcgtagaatttgccatcttcagcgcggatagcgtaataatctttaccttcactacgcaaacgtacgcccagcagctggctttgctcacgtttaccatcaagcatttctcgagacattaacaccgcaaattcatcgccttttttcagtttgcggaaatccatttgccactgcatggctttaatcactgcgctcacttcggcgctggttaaaccggcgtttctggcgctggcaacaaagcttcccccgacggtacctttcagcagattgttaacccactctccttgctgcatttcgctggtcattttaaaaccgttagcggcagtacggtcataggttcgggtttcacgacgagacacttcccaggtgaggcgctgcagttcgccgtccgcggttaatgtccaggagagttgttgaccgattttcaggttacgcaattctttgtcggccgcagccagttgggtgatatcacccatatcaataccatactgattgagaatgctgcttagcgtatcgccagtggaaacaacatattcatgcacgcccgcttcaccggcgattttgtcatccagttcgtcctggggaatggcttcatcttcttgtgcagcttgatcaatcggctcactggcttcaggtaagaggctacgaatttcgttctgttccagctcaatggttttgacaattggcgtggcatcacggtgataaacataaggccgccagacagcgacggccagagtaagaacggtgaggctccccaacataacgcggtgtggtcgcggtaaattattaaacgccagggcgacagagcgggctatctgttgcacgtaatcacttcctcattaatctcctttcaggcagctcgcatactggttggctaattgactcaggaattcactatagcttgttttacccagtttgatattcgtccccaggggatccaacgttcccatacgaacggatgtccctcgtgcgacgctctcaacgaccgctggcctgaactgtggctcagcaaaaacgcaggttgctttttgctcaaccaactgtgttcttatttcatgtaaacgctgcgcgccaggttgaatctcagggttaacggtaaaatgaccaagcggtgtcagtccaaactgtttttcgaaatagccgtaagcatcgtgaaaaacgaaataacctttccccttgagcggcgcgagctcgttaccaacctgcgtttcggtactggctaattgtgcctcaaaatccttcaggttggcgtcaagtttggctcgactttgcggcataagttccactaattttccatggattgcaaccgctgtagcccgcgctatctctggggaaagccaaagatgcatgttgaaatcgccgtgatggtgatcttcgtcacttttttccgcgtggtcgtgatcatcatcatcgccgtgaatacttttcatcagtagcggtttcacatcttcaagctgcgcaatcgttacctgcttcgctcctggtaatttgcttaccggtttttgcataaacgcttccatctccgggccaacccaaacgactaagtccgcgttctgtaagcgttttacatcgcttgggcgcagactataatcatgttcactagcgccgtcaggaagtaaaacctctgtttctgttaccccatcagcaatggcagaagcgatgaacccaacgggtttaaggctagcgacaacggcggcatctgcggcctgtgttgcacctccccagagagcggcggataatgctgcgaaaagaagcgtttttttatgtaacataatgcgaccaataatcgtaatgaatatgagaagtgtgatattataacatttcatgactactgcaagactaaaattaacatgacaagtctggtttccctggaaaatgtcagcgtttcttttggccaacgccgcgtcctctctgatgtgagcctggaacttaaacctggaaaaattttgactttacttgggccaaatggcgcaggtaagagcacactggtacgggtagtgctcgggctggtaacacccgatgaaggggttatcaagcgcaacggaaaactgcgcatcggctatgtaccgcagaagctgtatctcgacaccacgttgccactgaccgtaaaccgttttttacgcttacgccctggtacacataaagaagatattttgcctgcactgaaacgtgtccaggccgggcacctgattaacgcaccgatgcaaaagctctctggtggcgaaacgcagcgtgtactattagcgcgagcattgttaaatcgcccgcaattattagtgctggatgaacccactcaaggcgtggatgtaaatggccaggtggcgttatatgaccttattgaccaactgcgtcgtgaactggattgtggcgttttaatggtttctcacgatctgcatctggtgatggcaaaaaccgatgaagtgctgtgcctgaatcaccacatttgttgttccggcacaccggaagttgtttccctgcatccggagtttattagtatgtttggtcctcgtggtgctgaacaactgggtatctatcgccatcatcataaccatcgtcacgatttacagggacgaattgttttgcgtcggggaaatgatcgcagttgatttaacgtcggggaaatgatcgctcatgattgaattattatttcccggttggttagccgggatcatgctcgcctgtgccgcgggtccgctgggtagctttgtagtctggcgtcgtatgtcttatttcggtgatacgctggctcatgccagtttacttggcgtcgcgtttggtttgttgctggacgtgaatccattctatgcggtgattgccgttacgctgctgctggcgggcggtctggtatggctggagaagcgtccacagctggcgatcgacacgttattagggattatggcgcacagtgccctgagcctgggcctggtggtcgtgagtctgatgtctaatattcgtgttgatttgatggcttacctgttcggtgatttgctggcagtgacgccagaagatctcatctctattgcgattggcgtggtcatcgtggtggctattttgttctggcaatggcgcaatttgctgagtatgacgataagcccggatctggcgtttgttgatggtgtgaaattacagcgagtgaaattgttgttgatgctggtgacggcattgacgattggtgtagcgatgaaatttgtcggtgcgttgattattactagcttgctgattattcctgctgctactgcgcgtcgctttgcccgcacgccggaacagatggctggtgtcgctgttttggtggggatggtggcagtgactggcggtttaaccttttccgcggtttacgatacgccggcgggtccgagcgtggtgctatgtgcggcactgttatttattctcagtatgatgaaaaagcaggccagctaatctatcgctgaacacatttgtcggatgcggcgcgagcgccttatccgacctacggttcggtatctctggtagtcctggtaagacgcgaacagcgtcgcatcaggcatattgccagtgccggatgcggcgcgagcgaccaatccgacttacggcatttctggcggcgttatgccaaagtgattccacgcccgcgtcgtcgccatacgcccacgcggtgtacgctgcaaaaagccttgctgaatcaaataaggttccagcacatcctcaatggtttcacgttcttcgccaatggctgccgccaggttatccagacctacaggtccaccaaagaacttatcgattaccgccagcaacaatttgcggtccatataatcgaaaccttcagcatcgacattcaacatatccagcgcctgagcagcgatatctgcgctgatggtgccatcgtgcttcacttcggcgaaatcacgcactcgacgcagcagacggttggcaatgcgcggcgtaccgcgagcgcgacgagcaacttccagcgcgccgtcatcactcatctcaagccccataaagcgtgcgctgcgactgacgatatattgcagatccggcacctgataaaactccagacgttgcacaataccaaaacggtcgcgcaacggacttgtcaggctacctgcgcgcgtggttgcaccaatcagggtaaacggcggcaaatcaattttaatggagcgtgccgccggaccttcaccaatcatgatatccagttggtagtcttccattgccgggtacagcacttcttcaacaactgggcttagacggtggatctcatcaataaacagcacgtcatgcggttcaaggttagtgagcatcgcagccaaatcgcccgccttttccagcaccggaccagaagtcgtgcgtaaattaacgcccatttcattggcgacaatgttggcaagcgtagttttacccaaccccggaggaccaaaaatcaacaaatgatcgagggcatcgccgcgcagtttcgctgctttgatgaaaatctccatctgactacgaacctgcggctgaccaacatactcttccagtaatttggggcgaatggcgcgatctgctacatcttccggcaaagtggtaccggcagaaatcagacggtctgcttcaatcatcctttacctcataacgcggcgcgtagggcttcgcgaattaaagtttcactgctggcgtcagggcgagcgattttgctcaccatgcggcttgcttcttgtggtttatagcccagcgccaccagcgcggcaaccgcttcttgttcagcatcgtcggtcgccgggctggcaggagacgtgagtaccaggtcggcggctggcgtaaagagatcgccatgcaaacctttaaatcggtctttcatttcaacaatcaagcgttcggcggtttttttgccaatacccggcagtttcaccagtgcccccacttcttcacgctcaacggcattaacgaactgctgcgcactcattccggagaggatcgccagcgccaacttcgggccgacgccgttggttttgatcaactctttgaacaatgtgcgctcttgtttattgttaaaaccgtacagcagttgcgcgtcttcacgcaccacaaagtgggtgaaaacgatcgcttcctgacccgcttcagggagttcataaaaacaggtcatcggcatatgcacttcatagcctacgccgcccacttcaattaacaccagcgggggttgtttttcaatgatgatgcctctgagtctgcctatcacatgacgctcctgcgtaatgaatcaaagataatgctgtatgataaaaaaatgctggatagatatccagcgaaggatgaagaaaacttgcgaggtgtctcgatgaactgaaaaatggcacagtataatttattctacaggttatattggaagcaaatattttaatattacatattcagtgaagaaatgcgtaataaaaatatacattgcgcctcctgaaaaaataaattttttatgctattacgtatatttgtatctatttcaatggaatgacaacgtgaatattaattaccctgctgaatatgaaattggagatatcgtctttacatgtataggtgctgccttatttggtcaaataagtgctgcaagtaattgctggagtaatcacgtcgggatcattatcggtcataacggtgaagacttcctggttgcagaaagccgggttccccttagtaccatcaccacgctatctcgttttattaaacgtagctctaatcaacgctatgctataaagcgattagacgctgggctgacagaacgacaaaaacaacgaattgttgaacaggttccctcccggctacgcaaactttaccacaccggttttaaatacgaatctagccgccagttctgtagtaaatttgtttttgatatttataaagaagcgctatgtattccggtgggtgaaatagagacgtttggagaattgttaaatagcaatccgaatgcaaaactcactttctggaaattctggttcctgggttctattccgtgggagcgtaaaaccgtcacgccagccagtttgtggcatcatccgggtttggtgttgattcatgcggagggagtggaaacgcctcagccggaactgaccgaggcggtataacttaacgcagtcgccctctcgccaggttcagccggctttcgctcatctgcatcgcattctgactaacgtggcagtgggtgatagcaatcgccagcgcatcggcggcatccgcctgtggattagcgggcagtttcagcaaggtgcggaccatatgctgcacctggcttttttcggcactgccaatacctaccaccgtttgctttacctgacgtgccgcgtattcaaatactggcaactcctgattcaccgccgccacaatcgccacgccgcgcgcctggcccagtttcagggcactgtcagcgttctttgccataaagacttgttcaatggcgaaataatcaggctggaactgggtgatgatttccgtcacgcccgcatagatgagtttcagacgagacggtaaatcatccactttggtgcggatgcatccgctacccaggtaggacagttgcctacctacctggcggatgacgccgtagccggtcacgcggctacccggatcaatgccgagaataatagccatcacgcgtctccgttttgctgtttagcaggcctcatcagagagtcgctgcgacctcatcagagatttcaccgttatggtaaacttcctgcacgtcgtcgcaatcttccagcatatcgatcagacgcatcagtttcggtgcggtttctgcatccatatcagctttggtagacgggatcatggaaacttccgcgctgtctgctttcagacctgccgcttccagagcgtcgcgcactttacccatttcttcccatgcagtgtagacatcaatcgcgccgtcatcataggtcacaacgtcttcagcacctgcttccagtgctgcttccatgatggtgtcttcatcgcctttctcgaaggagatcacgccttttttgctgaacagataggcaacggaaccatcagtaccgaggttaccgccacatttgctaaatgcatgacgcacttcagcaacggtacggttgcggttgtcagacagacattcaatcatgattgccgtgccgccaggaccgtaaccttcgtagatgatggtttccatgtttgcatcatcatcaccgcccacaccacgtgcaattgcgcggttcagtgtgtcacgggtcatgttgttagacagtgctttatccaccgccgcacgcagacgcgggttagcgtccggatcgccaccgcccagcttagccgcggttaccagctcacgaatgattttagtgaagattttaccgcgcttagcatcctgcgcagctttacgatgtctggtgttggcccatttactatgacctgccataaaaatatctccagatagccctgcctgttcaggcagcgttaattacaaactgttcaatcgcctgccggttgctccaggacttagtgagcgccgccgcagcaggcgcatcaagccacttgtaagccagatgttcagtgaaaacgatctgccgctcgtgcggaagcgcaagacagaaccaactttccgtattacgcgtcacgcccggcgcatagcgatgacgtaaatgactaaaaatttcaaactctaccgtgcgctgacagtcaattaaggtcagttgttcagcgacaacatcaatggtgacctcttcctttacttcgcgcatggcagcttgcggcgcggtttcaccctcttccacgctgccggttacgctctgccagaaatcgggatcgtcacgccgctgcaacatcagcacccgtttcgtatcttgtgcgtagatgaccactaagatgctaacgggacgcttatacactttatccttcacgctgcctcttcgttgactgccttcgctcatcccattcacatagttatctatgctcatgggagttcactcagttgccgcctcgatgcaacgcgaatgatttcgtgtatttgagtcatatcagttattctcagccttcttcacaacctgaatgctcagctcagccagtgcagtcgggttagcaaagctcggtgcttcagtcatcagacacgctgccgccgtggttttcgggaaggcgataacgtcacggatattgtcggtgccggtcagcagcatggtcagacggtcaagaccgaatgccagacctgcgtgcggcggagtaccgtatttcagagcgtcgagcaggaagccgaatttctcgcgctgttcctcttcgttgatacccagaataccaaacaccgtctgctgcatatcaccattatggatacgtacactaccaccgcccacttcgtaaccattgatgaccatatcgtaagcgttcgccaccgcattttccggtgcagctttcagttctgcagccgtcatatctttcggactggtgaacggatggtgcattgccgtcaggccgccttcaccgtcgtcttcaaacatcgggaagtcgataacccacagcggtgcccatttgctttcgtcggtcagaccaaggtctttacccactttcaggcgcagtgcacccatcgcgtcggcaacaattttcttgttgtcggcaccgaagaaaatcatatcgccatcttgcgcggcagtacgatccaggatgtcttcgatgatttctgcattaaggaacttcgctaccgggctgttgataccttccagacctttcgcgcgttcgttaactttgatgtaagccagacctttcgcgccgtagattttaacgaagttaccgtattcgtcgatctgcttacgggtcaggcttgcgccgcccggaacgcgcagagccgctacgcgacctttcggatcgttcgccggacctgcaaatacagcaaactcaacagatttcagcagatcagcaacgtcagtcagttccatcgggttacgcagatccggtttatcagaaccataacggcgttctgcttccgcaaaggtcattaccgggaaatcgcccagatccacacccttcacttccagccacagatgacgcaccagcgcttccatcacttcacgcacttgcggcgcggtcatgaaagaagtttccacatcgatctgagtaaattcaggctgacggtcagcacgcaggtcttcgtcacggaagcatttaacgatctgatagtaacggtcaaaaccggacatcatcagcagctgtttgaacaactgcggggattgcggcagtgcgtagaatttacctttgtgcacacgagaaggcaccaggtagtcacgcgcgccttccggcgtggctttggtcagcatcggagtttcgatgtcgaggaagccgtggtcatccataaaacggcgcaccaggctggtgattttagcgcgggttttcaggcgctgagccatttccggacgacgcaggtcgaggtagcggtatttcagacgcgcttcttcggtgttgacgtggttagagtcaagcggcagaacatctgcgcggttgatgatagtcaggctggacgccagcacttcgatttcgccggtcgccatatcgcggttaatatttttttcgtcacgcgcacgtacggtgcccgtgacctgaatgcagaactcattacgcagttcagaggccagctttaacgcgtccgcacgatccggatcgaaaaatacctgcacgataccttcgcggtcgcgcatatcgatgaagatcaggctaccaagatcacgacgacggttgacccaaccacacagagtcacctgctgccccacgtgggacaaacggagctgtccacaatattctgtacgcatgagatatcccttaacttagctgccggcggatgccccctgctgcgcaggtgaccaagtcgcagcgttagctgtatgtcacaactgaatgaaaaaaggcggctattatactggaaattctgccgcaccgtaagagcctggcccgcgctggaacgcctcgttaccactttatatcgggcctgaaatcagactctacgccagtttgctataaaggtgttgcccgaactcataaaaattaacaaaatttgtcgttccgccatcggctaatcgcattaaggtgtgaggcacgattttgttttttcaggagtcattatgcttgaacttaatgctaaaaccactgcgctggtggtgatcgatttacaagaaggcatcttaccttttgccggtggtccacatactgccgatgaggtagttaatcgcgccgggaagctggcggcgaaatttcgcgccagcggtcagcccgtgtttctggtgcgcgttggctggtctgccgattacgctgaagcattaaaacagccggtcgatgcgcccagtccggctaaagtgttgcccgaaaattggtggcaacatcctgctgcattaggtgcaaccgacagcgatatcgaaatcatcaaacgtcaatggggtgcgttttacggtacggatctggagttgcaattacgccgccgaggtatcgatacaatagtgttatgtgggatcagcaccaatatcggtgttgaatccaccgcccgcaatgcctgggaacttggctttaatctggtgattgccgaagacgcctgtagtgccgccagcgccgagcagcacaataacagtatcaaccatatctacccgcgcatcgcccgtgtgcgtagcgtggaagagatcctcaacgcgttatgatttacatcggtctaccgcaatggagccatcctaaatgggtgcggttggggatcaccagccttgaagagtatgcccgccactttaactgcgtggagggcaacaccacgctttacgccctgccgaaacccgaggttgtcctgcgctggcgtgagcagaccacagatgacttccgcttctgttttaagtttccggcgaccattagccatcaggcagcattacggcattgcgatgatttagtgactgaatttttgacccgcatgagtccgttggctccgcgcattgggcaatactggctgcaactgcctgccacattcggcccacgggagctgcctgcgctttggcattttctcgattctcttcctggcgaatttaattatggcgtggaagtccgccatccacagtttttcgccaaaggagaagaggaacaaacgcttaatcgcggtttacatcagcgcggcgttaatcgggtgattttagacagccgcccggttcatgcagcacgtccacacagtgaagctattcgcgacgctcaacgaaaaaaacctaaagttccggtacatgctgtactgacggcgacaaatccgctgatccgttttatcggtagtgatgatatgacgcaaaaccgggaattatttcaggtctggttacaaaaattagcgcagtggcatcagaccactacgccttatctttttttacatacgccagacattgcccaggcaccggaactggtacataccctgtgggaagacttacgtaaaacgcttccagagatcggagcagttccggctattccacagcaatcttctcttttctgaatttgccacctatcatagacaggtgccatcggccattttaaagggagtttgtatggtaagcgcgctgtacgccgttttaagtgcgttgttattaatgaagttctcttttgatgtcgttcgcctgcgaatgcagtaccgcgttgcctatggcgacggcggttttagcgaactgcaaagcgctattcgcattcatggtaacgcggtggaatatattcccatcgcgattgtgctgatgctgtttatggaaatgaatggcgcagaaacctggatggtgcatatttgcggcatcgttttgcttgctggtcgtctgatgcattattacggttttcatcaccgtctgttccgctggcgacgttccggcatgagcgccacctggtgtgcgctgttgctgatggtgctggcgaatctttggtatatgccctgggagttggttttctccctgcgttaacgcacaatacgccactttctttttcccggatttttacgttatgtctcaccgcgacacgctattttctgcccctatcgccagactgggcgactggacctttgatgaacgggtagctgaagtcttcccggatatgatccagcgttccgtacccggctattccaatattatttccatgattggtatgttagccgagcgcttcgttcaacctggtacgcaggtttacgatctgggttgttctctgggcgcggcgacgctcagcgtgcgtcgcaacattcatcatgataattgcaaaattattgccatcgacaactccccggcgatgattgaacgctgccgtcgtcatattgacgcctataaagcccctacgccagtagacgtcattgaaggtgatattcgcgatatcgccattgaaaacgcaagcatggtggtgctgaattttaccctgcaattcctggaaccttccgagcgccaggcgttactggataaaatttatcaagggctgaaccccggcggcgcgctggtgcttagcgaaaaattcagtttcgaagatgccaaagttggtgaactgttgttcaacatgcaccacgactttaaacgtgccaacggttacagcgaactggagatcagccagaagcgcagcatgctggaaaacgtgatgctgaccgattccgtggaaacccataaagcacgcctgcataacgccggttttgagcatagtgagctgtggttccagtgctttaactttggtagtctggtggcattaaaagcagaggacgctgcatgatcgactttggtaacttttattctctgattgccaaaaatcatcttagtcactggctcgaaacgctgcccgcgcagattgctaactggcagcgcgagcagcagcacgggttgtttaagcagtggagtaatgcggtggagtttctacctgaaattaaaccgtatcgtcttgatttattgcatagcgttacggcagaaagcgaagagccactgagcgcagggcaaattaaacgcattgaaacgctgatgcgcaacctgatgccgtggcgcaaagggccgttcagtctgtatggcgtcaacatcgataccgaatggcgttccgactggaaatgggatcgtgttctgccccatctttctgatttaaccggacgcaccattctggatgtcggctgcggcagcggttatcacatgtggcgcatgattggcgcaggcgcgcacctcgcggtggggatcgaccctacgcaactgtttctgtgccagtttgaagcggtgcgtaaactactgggtaatgatcagcgcgcgcatttgttaccgttaggtattgaacaacttccggcactgaaagcctttgataccgtctttagcatgggcgtgctttaccatcgccgtagtccgctggagcatctatggcagttgaaagatcaactggtcaatgaaggtgaactggtgctggaaacgctggttattgatggtgatgagaacacggtgctggtaccaggcgatcgttacgcgcaaatgcgtaatgtctatttcatcccttccgcgctggcgctgaaaaactggctgaagaagtgtggttttgtagatatccgcattgcggatgtgagcgttaccaccacagaagagcagcgacgcaccgaatggatggttaccgaaagcctggccgatttcctcgacccacatgatccgggtaaaacggtggaaggttatccggcacctaaacgcgcggtgctgattgcgcgcaagccgtaaaggtctggtattactgccggatgcggcgtgaacgccttatccggcctacaaaaccttgctaattcaatatattgcagggactatgtaggcctgataagcatagcgcatcaggcagctttacgtttgcataacctcagcgcccgtttccgggcgctattcacgtcttacgcctgaacagctggctgatcaaacgccgttaacttcggtgcattgcccgtatatttttcgatatacaccaacgcactgttaccggcacaggcatttgccagctggctgctggggatatccgccgttaacacgttcgcactgccgtttttacacaagccattttccagatctggccatgcaccttcatgcacgcataccacgccttttttgatcccgtcagtcaccaccgcgcctgtcaaaatctgaccacgtttgttccagacacgcaccagatcgccattcgcaataccaaagcgtgcagcatcttcggtgtgaatagtgattggttcacgatcggcgatcgcatattttttacgcagttccgcatagttaagctgactgtgtaaacggtgtgccggatgtgcggtcagaagctgtaactgcttctcgtcggcggtacctttccattcatcaggagccagccaggttgggtgtgccgggcaatccttatagccaaatttttccaacgttttactatagatttcaattttgccgcttggcgtacccagcgcatttttcaccggatcggcgcggaaatcaccataacgaacgtactgttcgttcttctcgctgtggcgcatttcgatcagtttattttgctgccagaaggcattaaacattggcatagtgacgcgttgcgcacgggcacctttctgagcggcatcatagaaaaatttcagccacgccatttcatctttaccttcggtatagatctcttttccgccaggtttgagtaattccgcaagatcggcaaacacgtcaaaatcgttacgcgcttcaaattgcggagcaacagcctgcttcatcggcacaatatgctggttgctgtaatcaccggtcatcgtcaagtcattgcgctcaaagcttgtggtgatcggtaatacgatatctgcgtgtttggctgctgcggtccagtagcattcagaaacgacgatcatctccggtttctgccatgctttaatcagacgattagtatcctggtgatgggtaaagttaccgccacccgcccaccagatcattttgatattcggatacgtttgttctttaccgttatgctgatatttgccgccaggattttccagcgcatcgacgatacgggcaacaggaatcgccgtcattccgccatcatcagcggcctcgctggcatgtccggcaatcgccgcagacatttccggcagcacgccgccaacacgcgtcgggttgccaccgttggagtaatgataagagaaaccaaaaccgccgcccggtgtaccaatctgccctaacatcgccgccagcgtcaccagcatccagtgtttctgttcaccatattgctggcgctgaattccccagcctgccatcagcattgtgcgattcgccgccatcagttcagcgagtttgactatctgcgcttccggtacgccagtaatttccgccgcccagaccgcgctcttcggcgtattatcgctcttacctgtcagatactcttcaaactgcggatacccggtagtgtatttttcaaggaacactttatcgtgtttgccttgtgtcatcagggtatgcgcaatccctaacatcagtgccacgtcggtgcccatattcggcgcgatccaggtggcattatcgtcaaagaattcgatggtttcggagcggataggatcaatggcaatcactggtttgccagattttttcagctgatggaagtattccagcccttgctcatcggtactgctccaggcaatttttaaggtattcagcgggttcattccccacagcaccacaacctggctgttttccagaatcagcggccaggaggtctgctgttcatacacctctacagaaccgaccacatgcggcatgatcacctgtgctgccccggtactataatcgccgctatgcccggaataaccgcccgccaggttcatataacgttgcagtaaggtttgcgctttatgcaacacgccagaagagcgccagccgtaagatccggcaaaaatggcgcttggtccgttagctttacgaatacgatcatgttgctcatgaatcagttttaatgcctgttcccagctcacctgtacataggtatcttcgccacgacctttcgccggttgcagtggattatcgagatagctttttctcaccatcggatgctgaatacgcgccgtggtgtgtacctgatccgccgccgtagactgtaaggaattcggtatggttttcgccagcgcgcctgtactagaaacaatcttgccgtccttcacttctacgttcatcgctccccaacgtcccgcggtgaggattttaccgcccttctcttctgcccatgcggggagcggtgctgcgcttgtcaccaccagcgctccagcggcaataccgctgtgtttaataaattcacgtcttgttaatgtcataacttcctccctgatcaacgaggatcactgtttctcggtaatatctttggcgttgtactggaaataccgcgttaaaatgtccagttcgttttcgctcatgctggttcgtgcccccattcctttggcaatggacggccacgcattgacggtgtaatggtcggcggcaataggggcatgacaaccagcgcaataggtatcgtcaagtttttcagcgtattgccatagcggtttacggtccgctaatgcgggatcggtaagcgcaccctgtaaagacgcctgacgccattgattgccgtattcgtcagcctgccattccccgtttacagtgagcgccttgataccttcttcacttaatgtggctagcgccagccgttgacctgccgccaggtagagcgtgttttcactgccctgcatttgataaccctgcaacagaacgatcggctgtttgccactggcatcaacgacggtgagatcggttccaggattcacggtagccagctcgcctatgtgagaagttttgaaaggataaatatgtgcgccattagtaacactagtagcggcctgactttccagctcatgcgccgcgttgtcatccatttttatttctggcggaaaatgggcaatgcctttatgacaatcgatacaggtttcgctgtccttttgtgctttgttatgcattttctgcgcagattcactttggctggcaatatccatggcatcaaaagaatggcaactacggcacgttgcagagtcagtggcttttaattctttccatactgtttcggccatttcctggcgatgagcttcgaacttatcgtcactgtctattttgccgctaacaaattcatgataaatatctttagatgcctttaatttagcaaataaataatccatcccactctttggaatatggcaatcggcacattccgcacgtatccctttctggttgctaaagtggacagttccctgatattcctcaaaaggtttactcatgctgtggcaggaaaggcaaaatgctgtatcgctcgttttatgtaagactttttgcgccagcaataacccgccgccaccaaccacaaccgctatcagcaaaaacaataacccaatgcgttttttccctcgcatagattcctctaattaaattactggacaccgaaatcattgtataattaaatatacaacgaattaaccgcttgcataattaggcacaacactgcctgaaacaatcgataaagaatatgatttattacaatgtaatcattaattgctaaggaataacccagttgctatttagaatatatatttatcagttttagtaatttaaatcccataattaatgtgaatatatacaatatttttagcacaacgctatgcgcactgtcacccgctcaacagatcacggttatcgttcgttttttatactgttcagggataaaaaaaggcccctgttgaaattgcaggggcctggtacgagcaagcatcatattgggcgacatgatgcaacggtaaaaatcatttggcctgatggcgttcaatgattcctttcatttcagcaaccgccgccccgtctacgatataacggctatactcgtccgcgtgttcatcactactcatggacaatccttgattacgataacgcatcggactggcttgccacgctcccgcggagctatggacttccagcactccggcatcgaggaagtggtgcaggttttctgcacggactcctgctccggccataatgattggagcatcacgatgggcaataagttccataattttacttaaaccttgcagtgcgtcacttttttgcccacttgtcagtacccgggcaatgcccaattccgcaagattattgagtgtatataaagggttagcgcacatatcgaaggcgcgatgaaaagtcactgccagcggaccggcagcagccattattttttccattcgtggcatatcgacattcccgtcaacatcgagaacgcccgtcaccagtccaggaaaacctaattcgcggaccgtgcgcacatcctcaagaatggcggcaaactcaccgtcgctgtagcaaaaatcaccaccgcgtgggcgaattatcggatgcacagggatcgtcacccgctggcgcacggatttcagtacacccaagctcggcgttaagcccccctcttttggggctgcgcataattcaactctgtctgcgccgttttgctgcgccgttagtgcacattccatgctgtaacagcaaatttccagtaatgccatttttactccttaattacgcgctctgctcgctggcaacgatctcttcaatggaccacggatgaaacttaatagttgttttgccatcggtgaccgccagcgtcggattcggtaatcgctcatgctcaccttttgggctactggttttcacactgatccccggtaggctgagtccttcatcagaaagcaatgccagcgcacgggcattcagcgtttctggatcacccggcagaacgatttcaatatgttcccaaccttcgtgtgggtaacgtttttccccgggccacggtagctccacaatagaaaactgccagtgcgcaacctgtaccggttcatgcaatttaaacagacaaatcggtctgccattgatcatattttcactcaaaagctcgccacactgttcaaacccgcgacgccagcgttcagcagtggcgttttgatggcaacgcaaagaaatgtgatcggcagtcagcggagtgatattcaaccccagacggcgggaaagttcatctaatgcgtggataaatcgcggtaaatcgcttgcaatatcctgcagctcgtcgatagattgccagttcgccataatcactcttcgtctttcagtaaaagcgttaatttaccctgttgccctgtgccaaccaaccgctgatttcacgccgcttctgatgcaatagtgaaaacggcaatacgccacgcgcacgttgctgacgaaaacagccatttgcagtatactcccgccctaatttctttaactggtgcgggcaatttttgctcgcttcatcaatgtaaggtattccggtgaatattcaggctcttctcagtgaaaaagtccgtcaggccatgattgcggcaggcgcgcctgcggattgcgaaccgcaggttcgtcagagtgcaaaagttcagttcggcgactatcaggctaacggcatgatggcagttgctaaaaaactgggtatggcaccgcgacaattagcagagcaggtgctgactcatctggatcttaacggtatcgccagcaaagttgagatcgccggtccaggctttatcaacattttccttgatccggcattcctggctgaacatgttcagcaggcgctggcgtccgatcgtctcggtgttgctacgccagaaaaacagaccattgtggttgactactctgcgccaaacgtggcgaaagagatgcatgtcggtcacctgcgctctaccattattggtgacgcagcagtgcgtactctggagttcctcggtcacaaagtgattcgcgcaaaccacgtcggcgactggggcactcagttcggtatgctgattgcatggctggaaaagcagcagcaggaaaacgccggtgaaatggagctggctgaccttgaaggtttctaccgcgatgcgaaaaagcattacgatgaagatgaagagttcgccgagcgcgcacgtaactacgtggtaaaactgcaaagcggtgacgaatatttccgcgagatgtggcgcaaactggtcgacatcaccatgacgcagaaccagatcacctacgatcgtctcaacgtgacgctgacccgtgatgacgtgatgggcgaaagcctctacaacccgatgctgccaggaattgtggcggatctcaaagccaaaggtctggcagtagaaagcgaaggggcgaccgtcgtattccttgatgagtttaaaaacaaggaaggcgaaccgatgggcgtgatcattcagaagaaagatggcggctatctctacaccaccactgatatcgcctgtgcgaaatatcgttatgaaacactgcatgccgatcgcgtgctgtattacatcgactcccgtcagcatcaacacctgatgcaggcatgggcgatcgtccgtaaagcaggctatgtaccggaatccgtaccgctggaacaccacatgttcggcatgatgctgggtaaagacggcaaaccgttcaaaacccgcgcgggtggtacagtgaaactggccgatctgctggatgaagccctggaacgtgcacgccgtctggtggcagaaaagaacccggatatgccagccgacgagctggaaaaactggctaacgcggttggtattggtgcggtgaaatatgcggatctctccaaaaaccgcaccacggactacatcttcgactgggacaacatgctggcgtttgagggtaataccgcgccatacatgcagtatgcatacacgcgtgtattgtccgtgttccgtaaagcagaaattgacgaagagcaactggctgcagctccggttatcatccgtgaagatcgtgaagcgcaactggcagctcgcctgctgcagtttgaagaaaccctcaccgtggttgcccgtgaaggcacgccgcatgtaatgtgtgcttacctgtacgatctggccggtctgttctctggcttctacgagcactgcccgatcctcagcgcagaaaacgaagaagtgcgtaacagccgtctaaaactggcacaactgacggcgaagacgctgaagctgggtctggatacgctgggtattgagactgtagagcgtatgtaatcgatttttcgtgagagtgaagcctgatcagggttagccgatcaggcttttttattgccatctaaatgtattctgaaaatggacatgccattgttttctcactgttggataagaggccagaagcgtaatatccggccccagggaaacgataacggttgaatttaaggaataccgcagtgtttaaatttcttgtattaacattaggcattatctcttgccaggcttacgcagaagatacggttatagtaaacgaccatgacattagtgccatcaaagattgttggcaaaaaaatagtgatgatgatactgacgttaacgtgatcaaaagttgcctgcgacaagaatacaatctcgtcgatgcgcaattaaataaagcctatggtgaagcttatcgttatatagaacaagtgccacgcacaggtgtaaaaaaacctgataccgaacaacttaacttgcttaaaaaaagtcagcgagcctggctggattttagggacaaagaatgtgaattaatccttagtaatgaggacgttcaggatttaagtgacccttattctgaaagtgaatggctcagttgtatgatcatacagaccaatacgcgaactcgccagttgcagctataccgtaactctgaagatttttatccaagccctttgacaagaggataattcacatctttttggcatgttttgttgcaagctattcctgataaataattgcaacaagacatcgagcctttttcactgagttattaaacatactcgcgagcgcgtcgctacgctagcaagcaaaaatgaaacaggaataatcgaaatgggatgttgcgcacagtcaaaataactcaccgtaaataatcatctgctataaataatcactttcatgcaataccagataagctatttttaaacagacacttaccgcacaacaaactaattaaatacaaagaaaggcaacaatcaacttaatgttaatgaaatgttttacatatattaaccacttgtttaatgcggagaatcagtacactattttcttataattacatttgaaattatatgatcaccgggagtgattgattaattatctttactaataatcagactaatatttacctgtttgaccgagttgggattgcgtcgtttctccattaggagtaaagctttaatgtcacctgaagttcacagaataaggaacaggttatgagctatagcaatattcttgtcgctgttgcggttacaccggaaagtcagcaactgctggcaaaagcggtatctatcgccaggccagtaaagggacacatcagtttaattactctcgcttccgacccggaaatgtacaatcaattagctgcgccgatgcttgaagatttacgcagcgtgatgcatgaagaaacgcaaagctttcttgataagttaattcaggatgcggggtatcccgttgacaagacgtttattgcctacggtgagttaagcgaacatattctggaagtatgtcacaagcatcatttcgatttggtgatttgcggtaatcacaatcacagtttctttagccgagcatcctgcagcgcgaaaagagttattgccagtagtgaggtcgatgtgctgttagttccacttacgggagattaaccgctcttacgcaagctttggaaaggtagcaactttatcgcgctgctggctttccgcgcttcgcggaactatctgctttaggtcgctaatgaagcactcctgccagtggttaatatcgtttttcacgataacgtccagcatttctgcatgacgggaaatacgttccgccaggctcatagtcaatgcacgatccagcgcagctgcaacttcgtcacgatcgtaggggttaacaattaacgcgctcgttaactcgtttgccgctcccgcaaattggctaagaacaagaacgcccggattggctgggtcctgagcagcaacatactcttttgctaccaggttcatcccgtcacgcagtggcgtcactaagcccacgtcagagtagcggaatattttcatcagtaatttacggtcaaaatgctgattcaaataataaagcggcgtccagcctaattgcccgtatttaccattaattcgtccagcttcattttcgagctgatgacgaatatcctgataggcttgcacatcaccacggctcgttggtgcaatctgggtataacgaattttaccatgatgctgcggatatttttccagcaacgcttcataggcgagaaaacgctctggcaaacctttggaataatccagccgttcgacagaaaagatattttgtacgtttttcagttccgctttaagttgcgccagttttggcggcagtggcccggcagcctgtttggctatttctttcggttcaatgccgatcgggtagacttctgttcgaaatgctttgccccaggctgtatggctttttgcgctacgtgtcgtgacgcgggtcaggttagaaagacaatccaggaacgccagacgatcgttttctgtctggaaacccagcaaatcataatcacaaagctgttcaagcaaggtgtcatatgtcggcagcgcgttgaagatttccggtgtcgggaaaggaatatgcagaaagaaaccaatgcgattattcactccccgtttgcgtaattcatgcgcaaatggcaacaggtgataatcgtggatccagataatgtcatcgtcttgcaacagcggcagtaatttatctgccagcaacgcatttacgcgtagatagccgtcccaggcaggacgctgaaattgcaccagatcgagccgataatgaaaagcgggccagagaacggcattggagaattggttgtagtattcgtcaaggtcctgttcgctgaggttaaaagaggcccacgtaatgttaccttttttcaccttttttagcggctgatcctcattccctgtttcaccactccagccaaaccacagtccgcctgcggctttcagtgcccccagtatgccaacggcaaggccaccggcactggcggcgtgctcgtctggtggtgcaatccggttagatactacgactaaacgactcatagtcatcactcctgttatttttacttagatactacgactaaagctctcatagtcatcactcctgttattttctcttttttgttgtaatgcggtggttatcatttcaagccagctccagacatccggcacacccgccagtcgccaacttgcctgagttgcacctgtgccaatttttacactcattccgcccagtcggttaacgactgcgaagccagattcatcggttaaatcatcgcccagaaatacgggcgttcgcccgataaagggagcttcctgcataaaagctgcaattgcctcacctttactggtacctctcggtttgatctcgacaacacactttccctgctgtaacgccatttgtggccagatctgagtaatacgttgcgctaatgtcattaatgcgtcttcatgctgcggagcctgacgataatgcagcgcaaaagccatccctttcgcctccagctccgcgccgggatactgagcgatgactgtatgcagttgcacgctaatatcacgcgcaatcgcatccggcagatgaacgatatgtgttttaccattgatgtcacggcgctccgccccatgcacgcccgctaacgggaagcgataaggttttgccagtgcgtcaagctccaccatactgcgcccacttatcaatgccaatgcaccatcacttgcggttgccagtagctgtagtccttgcagaatattgtcaggcacgacgacctgatcgggatgcggtttgatttccgccagcgttccatcaagatcaaaaaaccaggcatatttcgcggatagttcaggggtttcggttaacggttctgtcacccggttctcctccttctcttttcttattgtgttgcgcagaacgcgctttacagacatgtaagtatagacagtgtgacgggggtcgccatttgcaacgaagaacagccaaccgttatggcggttggctatggtgggaaaaaacgctaaattgttgcagaaaaaagcatcagacagtgcgtttcgctttttgcttgtaacggtcgaagatcaccgctgccagcaggattaagccgcgaaccacgtactgcgcgaaaggagaaatattaagcaggttcatggcgttttccacggtgcctaaaattaagatacccgccaccacataactgatttttccgatgccacctttcagagaaacgccacctaaaacgcaggcggagataacaatcagctcataaccaatgctcgtcattggctgcccactggtcatacgactagccagaataattccggctatcgcacttaccaggccactgagaacaaagataataattttggtgcgaacaaccggtacacccgccagacgcgcggcctcttcgttcccgccaatcgccagggtgttacgaccaaaggtggttttattcagcagcaaaccaaagataatcagacacgcgacggtgagccagattggcgcaggcagaccgaaccagttggcgtaaccaagggcaaagaagctttcatcttcgataccgaccgctttaccgtcactaatgatgtacgccagacctcgaacaatctgcatcgttgccaatgtcgtgatcagagcatttattttcagtttggcgataacaaagccattgaccaggccacagagaacgcccagcaacaaccccgctgccacgccaatccacaggctttcagtcaggttaataaccaccgccgtggtgacacccgcacaggcaattacggaggcgacagaaaggtcaaagtcaccggaagcgaggcagaacaacatgccacaagccaccatcccgctcatggaaattgccaggcccaaccctttcatattaatgaaggtggcaaaatttgggacaaaaatggcacaggcgataaagagcaccgcaaacaccaccagcatgccgtactgatcccagatacgcccgaagctgaaactgctcttaggtgcgccagacccgcttgtagaaacagaagacatcatactctccttactcaggcaacagcctggctgactttaggcatcgcaaggctcagtgcctgacgctcatctgcctgctcgtgtaacaattcaccggcgatttcaccttcccgcatcaccacaatccggtcggcaacgccgaggacttcaggtaagtcgctggaggcaaacagcaccgccacgccctgcgccgccagcgcataaattacgttatatatttcgtgcttagcgccaacatcaatgccgcgcgtaggttcatccagcaaaatgaccttcatctcttcgcttaaccagcggcccagaatggctttttgctgatttccgccactgagattcatgatcagttgctccgcgcccggcgttttgatgttgaggctacgaatgtggtgatcggcattgttttcttcccaaccgttgttgattacacaaccgccgagcacatgtttacgtctggcactgatgttgatattgtcgcgaacggagtgcacgggaataatgccttccgctttgcgatcttccgggcagagcatcatgcctgcggcaatggcgtggctcggtttacgaatatcgatcggctgttggtcgatataaacctgaccggcggtgatttgcgtcccgccaaacatgcctttcattaattcgctacgccccgcccctaccagaccaaacagcccaacaatttcaccactgcgaaccgccagacttattggcgtacgcacgcctggtgctttcacagcatcaagacgtaggcgctcctcgccataactacgcggttgccagccgtagatatcgccaatgtcgcgcccgaccatcgcctgcaccagcgcgtcgtggtcaacctgctgcatatcggtaaaggttttgacataacgtccatctttaaagacagtaatggcatcgctgagggcaaatatttcttccatacggtgagaaacgtataagattacccgcccctcttttcgcagttcacgaataacgcggaaaagattgtcgatttcacgggcagagagggagctggttggctcatcaaaggcgataattttggcgttacgcgccagcgctttggcgatttcaaccatctgccactgaccaatggagagatatttcagcggcgtgtccgggtcaatatccataccaagatgtttaagttgtaaacccgcctcataattcagcaaactgcgattcacaatgccgcctttatgcggcagctggccgagatagatgttttccgcgacggtcatttccggcacgagatgcagttcctggtaaataatcgccacgcccgcgttaagtgctgcggtcgtgtcggaaaaggacatttcctgcccattaatcactacagaacccgtggttggcgcatagttgccgctgaggatttttaagagagtactttttcctgcgccattttcacccatcaacgcatgaacctgaccggcatagcagtcaaaactaatatccgtcagcgccttaacgccgggaaacgttttaccgatgccgcgaaaactgagatacggggtagactgttgcataacgtctccgtgaatcactggtcgttcacaccccctctgcatcatgcagaggggaatttttccggcaaattacttaccgcctaaaccttttttctccagttcttctttaaagttgtcacgcgtgatcagtaccacgtcggtaacttcggtaaattttggcggttcaacgtcttttgctacccagttgtaaagcatttcgctggatttatagccatgtacgtccgggcttggcagcagggaaccgtagaagccggttgcctgtgctttagacagttcgctcaccgcatccacaccgttaatgccaatgccgatgatatcggccgctttaaagccctgaccttccgtcgcgcgtacgccgcccagcacggtgctgtcgttcataccgacgatcagccaatgtttaacttccggatgttgaaccagcatactgttggcagcgtcaaatgcccccgggatgtcgttagatttggtaggtacctgataaatttgtttttccgggaatccggccgctttcagcgcatccatagatcccgtagtacggcggcgggcggtatccagttcgttggcggtaatcgccatcaccgcgctttctttgacatcccagccacgtttctgcatctctttatacagttcctggccctgacgttcgccaattttagtcgccgccatcatcaccagcggaacggtatccattggcttacctttggcgttaacaaactggtcatccacggcaatgactttcatatcgtagccacgcgctttcgcgacgatggcagagccgagtttggggtccggagtacaaataacgaaaccttttgcgccactggcagccaggctgtcgatcgcgttcaatgttttttcgccatccggcacggcaatcttaataacctcaaaccctaaatccttcccggctttatcggcaaacttccattcggtctggaaccacggctcttccggttgcttcaccagaaaaccgagcttcaggttctccgccatagcggattgactcataacggctgccagaccaatggctgccagggctttagtaaatttgtgcatggttctctccagctttagtgtcgttttgtgtagggcaaaaacgaatgacattcgttaaattaatcggaaaacaaagcattaccttttaactaaaagataagtgactgtgttgacatagttttagcgagaaattaattctccataggagagcaatatcacatcgcagaattacagtgagaacgtgcataaatttagcgggaaaagacataagggaaagccaatttgtcagacaaattgtcgaatgcacagcagattaatccataagattagcctggaaatccttgttgtctttggtacccatgcgggatgtcttctttttaaccagtcaataggccgcattacctggcgttgagtttttgaaatggtgtaataaccgcaactcaaagatgtggaaaatgcacgtcattcatttcgtcattaattatcactgtgctcattaattaacagaacacgtataatgagagccatctcgcaaaaatgaaaaaacgttttataaaatcatcacttcatcatgaattcaaattcattgattaatatcaacaagatacaaaaagcactatcattaaaattcattgcagttacattgatttcatcaatgaaatgtaaaaatatataaacttgatgatttaagcattttcttatacccgttcagacgttattcttatttcagatcatcgtcagaattgactccacgatcacatttcggaccggcagaaaggaattattctgcaaacagtaattatggtgttttgatttatcttgcacctctccacttctggatataaggatattaggtatggcaaccgctggaatgcttctcaaactcaactctcaaatgaaccgcgagttttacgcatccaatctctaccttcacctgagtaactggtgttctgaacagagtctgaacggcaccgccactttccttcgcgcccaggcacagagtaatgtgacccaaatgatgcgcatgtttaactttatgaagagtgtcggcgctacccccatcgttaaagccattgatgttcccggtgaaaaactgaactctctggaagaactgttccaaaaaacgatggaagaatacgagcaacgttctagtacgttggcacagttagccgatgaagcgaaagaactgaatgatgatagtaccgtcaatttcctgcgcgatctggaaaaagaacagcagcatgatggtctgttgctgcaaaccattcttgatgaagtgcgcagtgcgaaacttgcgggtatgtgccctgtgcagaccgaccaacatgttctgaatgtcgtgagtcaccagctgcattgatcatcatcggcgctaatgcattgcgccgatgaaggttttgagaaaccgctgcctcatctgtttgaagcagcggtttttttaatgggattcaccctgtggggtaaacttgagttcaataagcgcgatggctttttggattgcccgcatggtgaccgggtctgcggcggcgggatggttagtaaagtcgatattcttcagctgactggacattttttcacgaacttcaacgggcgcgattacatcgagaacatccagaatttgtttgataaccaactggcaagcaaccacatcagaaaccaattcctgatcggcattcagcggctgggacatcgtaaactcctgatagcattttgaaagccgttatagtagcgacttcacatcttcagcgatagtcacatccaccgtcatcaggacacaaaaaaacctgccggagcaggttttttgttatcggaacatattgcctggcggtacgtctttgaacgtcttgcaatagttattgaacatacttttcaggattttgcgcagtttcatcgcggcactccgaccatttgttatacaggtgttattgtctttgcgcttataatatgacaaccatcacaaaaatcaatctttatgtgatacaaatcacataaatacccctttaatgttataaaaatgataatcaaaaaacagcccccctatttctgacacctacagatggcaagaaatagcgcctgccaggcgtcttttccggccattgtcgcagcactgtaacgcgtaaaatagtgctttctcttactcttctggctggaccatgagacttctgattctgactcttagtttaataacgctggcggggtgtacggttactcgccaagcccatgtgagcgaagttgacgcggcaacaggtattgtacggttagtttatgaccaggcttttttgcagcatgcccataccgatcgttatgtcagtcgcgggatcgccgatcgcgcatgccagcaggaaggctatacccacgcggtcccctttggtcagccagtaggcaactgtagcctttttgcgggttccttatgtttgaatacggaattcactttgagttatcagtgccatcattccgccttccctgtctttctctaaatattttaatcagcgaggggatcttcgctgattaaagaaatagcggtaatgcgttttattcccattcgtatttttaataattgaagtttatattttaccttttgcaaataataaaataacaaattatagtgacgccacagcaacaaatataacctttgtggagcactatcatgctgaaaccagaaatgattgaaaaacttaatgagcagatgaacctggaactgtactctagtctgctttatcagcaaatgagcgcctggtgcagctatcataccttcgaaggtgctgccgcgttcctgcgccgtcacgcccaggaagagatgacgcatatgcagcgtctgtttgattacctgactgataccggcaatttaccgcgtattaataccgttgaatctccgtttgctgaatattccagtcttgatgaattattccaggaaacctataaacacgaacaattaatcacccagaaaattaacgaactggctcatgctgcaatgaccaatcaggactacccaacatttaatttcctgcaatggtatgtttctgagcagcatgaagaagagaaactgttcaaaagcattattgataaattaagcctggcaggcaaaagcggcgaaggtctgtattttatcgacaaagaactctctaccctcgacacacaaaactaatgctctccggcggcaggtttactgccgccgtttcaaatcagtgacggcaaatcttactctgatcggtgctaaaaccgtctttgctaggtataaatttgccttttgctgccagaaacgctaccagctctcccgctgtcatcccttctgcgctgcaggtgtgaaaacgtgcctgttcaccaaaacgcgctttaatcgcagcttccagactggcatgcgtatattgctcgccactttcaatcatcatatttaacacttcatgaccgtgaatagagtccatcgtccctcctcaaaaaaagcctagcgtagcgattgccgcttatgaagactttgcgccagcgcaggactgaatgctttttattgtacatttatatttacaccatatgtaacgtcggtttgacgaagcagccgttatgccttaacctgcgccgcagatatcactcataaagatcgtcaggacagaagaaagcgtgaaaaacagaaccctgggaagtgtttttatcgtggcgggaaccacaattggcgcaggcatgctggcaatgccgctggctgcggccggtgttggttttagcgttacgttaatcttgttgattgggctttgggcgttgatgtgctacacggcgctattactgctggaggtgtaccagcatgttccggcagataccggtctgggcacgctggcaaaacgctatctgggacgctacggtcaatggctgacgggcttcagtatgatgttcttaatgtatgctctgactgcggcatacatcagcggtgccggtgaattgttggcctccagcatcagcgactggacaggtatttctatgagcgcaaccgctggcgtgctgttgttcacttttgttgccggtggcgtggtttgtgtcggaactagtctggtcgatttatttaaccgttttctgttcagcgccaagattatttttctggtggtaatgctggtactactgctgccgcatattcacaaagtgaatcttttaaccctgccgttgcaacaggggctggctctgtctgcaatcccggtgatttttacgagctttggttttcacggtagcgtgccgagtattgtcagctatatggatggcaacattcgtaagctacgctgggtgtttataatcggtagtgcgatccccctggtggcatatattttctggcaggtggcgacgcttggcagcattgatagtacaacctttatgggattgctggctaatcatgctggattaaacgggctgttacaggcgttacgcgaaatggtggcctctccgcatgttgagctggcagtgcatttatttgctgatttagccctcgccacgagttttctcggcgttgcgttaggcttatttgattatctggctgatttatttcagcgtagtaataccgttggtggacggttgcaaactggtgcaattacgtttctgccgccgttggcgtttgcactgttttatccacgaggatttgtgatggcgctgggttacgccggtgtggcgctggcggtactggcattgattatccctagcctgttgacctggcaaagcagaaagcacaatcctcaggcgggttaccgggtcaaaggtggtcgtccggcgctggtggtggtgtttctctgtggtattgctgtgattggcgtgcaatttttgattgcggcagggttgttaccagaagtggggtgatcagatagcctcaaattccttattgggtgccagaattaacgctgacacccaatttggcctcttaatgcaggcagcactgcttaaatttcttaccactaccgcacgggcaaggatcgttacgccccggtttctcttctgctttgatcggttgctgaacagctttttcctgcggatgcgccatccagtacgcatgtagatcaagcgccgccagtcgaatggcatctacgctctcttcaaacgcttctgggctcatcttttctacccgctcgaagttttcctcagtaccgtgcagcgcaatcgcctccagcgctggttttaagctatcgggcaacgtactccagtcagaaagtgccacgccccgcatatagccaaagcaccactcctcaacaatcgtcagctcgctgccatcaacttctcgcaagccgaataacggctcaaactgctccgggaattcgttcagacgctctgcggtatcggccatatgttgaaaagccagattcataaagcgcgtcatctctttctcactcgcccagcgcggcacatagtcagccccaccccacacggcaaccagccactgttccggttcaatctcttgcggagaactcaacaccgccgtcaataaaccgtccagctccgccacatcaaggatggcgtggtcagtgttgtatttggtcagaatatcgtccagccattccaactcactttcgtttaacggtcccgttttcatacgcttttccttgtggatctcaactcgccagcacctatcttacatgccggtccgtatcagagatactttttgagtggctttgctggtgattaaaaattaaggagggtgtaacgacaagttgcaggcacaaaaaaaccacccgaaggtggtttcacgacactgcttattgctttgattttattcttatctttcccatggtacccggagcgggacttgaacccgcacagcgcgaacgccgagggattttaaatcccttgtgtctaccgattccaccatccgggctcgggaagaaagtggaggcgcgttccggagtcgaaccggactagacggatttgcaatccgctacataaccgctttgttaacgcgccaaattcttcaggcctttcagccagacatccgcttgacgccgatgtcttttaaactggagcgggaaacgagactcgaactcgcgaccccgaccttggcaaggtcgtgctctaccaactgagctattcccgcattcatcaagcaatcagttaatcacttgattttattatcgtctggcaatcagtgccgccgttcgatgcgttgcattctacttacctggcgcgatgagtcaacgatatttttcaccacttttgatcgtttgctgaaaattacgccgaaacgatcactgatcaagcaaatctgcacgcgcagcgctcaaatattgcaacatactccacagagtcagtaccgcagccacaaagaaaagtgcaataccggcgtactcaacccaaatgttcggacgccacagcagccatgccaacgccaccatctgggcagtggttttcactttcccaatccaggagacggccacgctactgcgtttacccaactccgccatccattcgcgtagcgcagaaataataatttcacgggcgatcatcgttgccgccggtaatgtcacccaccagctgtgataatgctcggttaccagcaccatggcgatagccacgagaactttatctgccacagggtcaaggaaagcaccaaaccgggtactctggttccagcggcgtgccagaaaaccatcgaaccagtcagtcaccgccgcgacgcagaaaatgagcgcggcggcaaacgggctccaggtgacaggcagataaaagaccaatacaaagaatgggataaggatgacacggaacagtgtaagcaacgtagggatattaaattgcataatgacgggtaactatctgttgtcagtaagattacccctatgttgctacagagacatcaatgtttcaagctccagaagatcttttctgccagaccttggctaatacccggcacttttgcaatttcctcgacgctggcgttacgtaaaccttgcaaaccgcccatatatttcaacaacatttgccgacgttttggcccgacgccttcaatggtttccagggaactggtatttttgaccttcgcccgttttttacggtgcccgccaatcgcgtgatcatgactttcatcgcgaatatgctggataacatgcagcgcgggactatctggcggcaaactaaatccctcaccttccggctcaaagaacagcgtttccagtccagccttacgatctgctcctttggcaacgccaagtagcagcggatgatttttatcccaactgacatccagttcggcgaagacatttttcgcctgcgcaagctggcctttgccgccgtcgataaggatcacatccgggatcttactgtcgtcaatggctttaccataacgccgacgcagcacctgattcatcgccgcataatcatcgcccggcgtgatgcctgtaatgttatagcgccgatactccgcacgcagcgggccgttagcatcaaacaccacacaggaagcgacggtttgttcgcccatggtatggctgatgtcaaagcactccatccgcttcacttccggcaatttcaacacgctggcaagcgcggtcagtcgctggtgaacggtagattgctggctaagtttgctggttaaggccgtcgccgcattggtgcgcgcgagtttcagataacgcgccctatcgccgcgaggtttggtttgaacattaatcttgcgtcccgccagttcactaagggaatcggcgagcagcgttttatcgctaagattaaaatcgagcaggatctcacccggtaaggtgcgcatctggctgccttgtaaatagaactggcctacgaaggtttctaccacctcgctcagttccgtaccgccaggcactttcgggaaatagctgcggctgccgagcactttgccctgacgaatgaacaatacgtggacacaagccatgcccgcatcgaacgccacaccaataacgtcgaggtcgtcgccggtattggaaacgaattgtttttcggtgacgcgtcgcaccgcctgaatttggtcgcgaatacgtgcagcttcttcaaactccagattctggctggcagtttccatacgactaatgagttgcgtaagcacctgatcatctttgccagacaaaaacaggcgcacatactcgacctgctgagcgtattcttcttcactcaccagtccttcaacgcacggtcccagacagcgccctatctggtattgcagacacggacggctgcgattgcgataaacactattttcgcactggcgaatggggaaaatcttttgcagtagcgccagtgtttcacgtacggcatagccattcgggaacgggccgaaatattcacctttggcatgcttcgcaccacgatgcatcgccagacgcgggtgggtatcaccactcaggaagataaaaggataacttttatcatcgcgtagcaaaacgttgtaacgcggctgatagagtttgatgtagttgtgttccagcaacagcgcttcggtttctgtgtgagtaaccgttacatcaatttgctggatctgggcgaccagcgcttcggttttgcggctagcgaggttgctacggaaatagctggaaagccgttttttcaggtctttcgctttgccgacatagataaccgtaccaccagcatcgtacatgcgataaacgcctggctggctggttacggtttttaaaaacgcttttgcgtcaaactgatcactcactgactacttaatgtctccgcattacacagaccatggcgaattgccaggtgagtcagctcaacatcgccatgaatgtttagtttactgaacatacgatagcggtagctgttcaccgttttcggactgagattgagctgttcactgatctcattgaccttctggcccttggtgatcatcagcataatctgcaattcacgttcagacaaactggcaaatgggctttctgttttttctggttcgatctggcttaacgccatttgttgagcgatgtcagaagcaatgtaacgctgcccactatagacagaacgaatcgcactcacgacttcctgcggagccgcgcctttgctgaggtagcccgcagcaccggcctgcatgactttcgctggtaaagggttttctgtatggacggtaagcatgatgattttgacatcagctgtggaacgcgcgattttacgcgtcgcctcaagaccgccaatgcccggcatactcatgtccattagcaccacgtcaacggcatttgtccggcaccacttaacggcgtcttcaccgcagcttgcctcaccgacgacttttataccctttatatcttccagaatgcgtcgtatccctgcgcgcaccagttcgtggtcatcaacaagtagaacgttgatcaaaggaatatctccagaaatagggataacgctactgatagttagtcattcgtatattagcggtttttattgcaactttgaaacgttaaaaatggtgggtattcgatttttctctcgtttttgtcaattcgattgtccacagttatggtcacgcccgtcaccaacggcttaccggatcgtttcacagtaagccctacgatgaaatgtgacaaaaattgactttattcagcaaaaatgaaaatcagcccgctgaatatgtaacattaattaacccgaacaatacgggcaaaaaacattcatgataaaaatatttattggtcattatattaacgtattttatagcactgccgatatcacgctcaaaaaacaaccactgctatttttagcaaagcttatggtatactccgccgccttaacatttttcaccgcaaattttcattgcaacatgacgaggaaaataaatgagtacgcctgatttttctactgccgagaataatcaagaactggcaaatgaagtctcctgcctgaaagcgatgctgacgctgatgctgcaggcgatgggacaagctgacgcgggccgcgtgatgttaaagatggaaaaacagcttgcgctgatcgaagacgaaacccaggctgcagtattttccaaaacggttaagcaaattaaacaagcctaccgtcagtaatataaaaccggctgatagcgtgcctttcagccggtttttgcatctggcacgcaggacagaaaagagatcaaattaagccagtagcggccgcgtaacaggcaacctgggtcttatttggtgcattaatttttttctgcatgtttttctggtggaaattgaccgtattctcagagatactcaaaatcatcgctatctctgcacttgttttcccttccgccgtccacctcagaatttctttttcgcgcttgctgaaattcatctctggcgtcatcactatttcatcatttaaacgcatcagagccatcagactttcgcgcaccagtaactgcatttttaattgcagttcatcactaagaatgggtatttcgcgcgcgctgcaacgggaaaaggacaaaaagcccagcgcccggtttggcagcattaaatactgagtgacaccgcggcgtaaaccatgtgcgcgcgcggcttcccataacggctgtgcttcgctgaataagtcatcattccacattaaatggccctgactaaagttttcagggttcagcaccggatcaattgcgagaaagttttttgcctgataataactaacccacgcctcagggtaattggtgtaaaaagccactttaggtcgagtgaatggtaccgggtggcggacacataagctatagtaatcgtactccagctgctgagcctgaagctcaatttcatggtagacctcttctgcggtctccatcctctgaaaacgcaacagcatcgtgcgacgccagctgaaaaaatccttatcctgcatagtaaaccgcaacgcccttgagagtgagtatcatttataatgataattcaaactatcacataaataagatttatatataatttatattattcaggcaatgaattacttttgcaagccatcgcattctcttatgttattaatgagttatgctgatttgttaagcagttttatcaggcttgaaatggcgtccagccccgacaggtgaatcgtcggggctgattttttcttattattgcagcagaaacttctcgaggaactggcgggtgcgaggctgctcggttccgtaacgtttatcatgttatcctaaggattatccgaaaaataatacctacgaacatcttccaggatactcctgcagcgaaatatttgttttaagctcactcacatatcgcaacatttactttactttaagacaattccaggcaaattatacaacactttacgggatagtaagtccgcctgaaaaatcgcgagagtggcgcattaggtgacccatgttgttccgtttagtcatgatgaaatattcaggtaaggggaattatcgttacgcattgagtgagggtatgccatgagtacgattattatggatttatgtagttacacccgactaggtttaaccgggtatctgttgagtagaggggttaaaaaaagagaaatcaacgacattgaaaccgttgatgaccttgccatagcttgtgatagtcagcgccctagtgtggtgtttattaatgaggactgtttcatccacgatgcttctaacagtcagcgtatcaagctcatcattaatcaacatcccaatacgttatttatcgtttttatggcaattgccaatgttcattttgatgaatatctattggtcagaaaaaatttattgatcagttctaaaagcattaaaccggaatctctcgacgatatccttggcgatattctgaaaaaagagacaacgataaccagctttttaaatatgccgacgttaagtttgagccgaaccgaaagcagtatgttgcgaatgtggatggcaggtcagggaaccattcaaatctctgaccaaatgaatatcaaagccaagaccgttagtagccataaaggtaatattaaacgtaagatcaaaacgcataataaacaggttatctaccatgtcgtccgactgacggataatgtgactaatggtatttttgtcaacatgcgctaacacattctgactggtggtttcccaccagtcaggctgaataagattactctgctttctccacaaagataccgtcctgatgccctgcttcattaaagaaccagatgccgagcgggtagtcttccaggctaaccaggtacattgtgccttcactaaactcctcaactgccagtaccacgccaggacgacgcggaccgccatccgttttgactgttacccgatcattcaccttcatcgttttcctcctgtggctttgtgccagtgtagaacaatttcgtttttctggcagcgccaggcgcgcgcgagtgctgattttctcgacggtctatacttaagagatgccaggcggacttaacgactggcggcaacaacagagtaacggttgcgaggaaagatgatgaaaaccgcaaaagagtacagcgataccgcaaaacgtgaggtcagcgtcgatgtcgatgccctgctggcggcgatcaatgaaattagcgaaagcgaagttcatcgcagccagaacgattctgaacacgttagcgtcgatggacgtgaatatcatacatggcgtgaattggcggatgccttcgaactggatattcatgacttcagcgtctctgaagtgaatcgttgaatgcacaataaaaaaatcccgaccctgagggggtcgggatgaaacttgcttaagcaagaagcacttaaaaaattcgttacaccaggaaatctgatgtgttcatcaccttatccgcaatttttttcgctgacaagaaaatattcgccatatgaatgattaacgctacttatgaatagaaatgtgacgcacgtcaccccttggtggctctggcgtcagcgggatcgctcccgaaaaaatcatctttgataatttgtgcggttttgagaatcatcctggtaagaggagtactgcgcgactatgtttagtattcaacaaccactactggtttttagcgatcttgatggcaccctgctggacagtcatagttatgactggcaaccggcagccccctggctcacccgtttacgcgaagcaaatgttcccgtcattctctgtagcagtaaaacaagtgcggaaatgctgtacttgcaaaaaacgttggggctacaaggtttaccgctgattgccgaaaatggcgcagtgatccagcttgctgagcaatggcaggagatagacggttttccacgcatcatcagtggtattagccatggcgaaatcagcctggttttaaatacgctacgcgagaaagaacattttaaattcacgacttttgatgatgtcgacgatgcaaccatcgccgaatggacgggattaagccgtagccaggcggcgctgacgcagcttcatgaggcgagcgtaacgctaatctggcgcgacagtgacgagcgtatggcacaatttaccgctcgtctgaacgaactgggcttacagtttatgcagggtgcgcgcttctggcacgtactggatgcttctgccggaaaagatcaggctgccaactggattatcgcgacctatcaacaattgagtggcaaacgcccaaccacacttggcctgggcgatgggccaaacgatgcgcccttactggaggtaatggattacgcggtgattgtgaaagggctaaatcgtgaaggggtgcatctgcatgatgaggatccggcccgcgtctggcgaacgcagcgtgaaggaccggaaggatggcgtgaagggctggaccattttttctccgcccgttaagcgttatcgctcgcgaatacccgattacgcccagcctgtttagcgagataaagccgacggtcggccagactctggagttgttcaaaatcataatcaccggtttcctcgctgctgcttacccccaggctggcactgatgcgtatcgtcgtactcttggcgatcaacatctctttttcatttaatttcagtcgaatacgttctgcgacctccgcagcctccgtcagactcgcgcctggcagaatcacacaaaactcctcaccaccgacccgcccggcaacgtcctgcgcacgcaaggaactgctaattaatccggcagcatgagaaagaacacggtcgcccgcctgatgaccaaagcggtcattaatcgctttaaaatggtcaagatcgacctgaatgacagaaaaaggatgttggtgcgtctgacacaatttagcgagcggacgggctttttcgaacagtgcgccacggttatataaacgcgttaaggtgtcgtgccacgcctgccactgcaagctgctttgcagaacatacatgttgctaaccatccggcgaatcacataccaggagatgagtaacatggtggtaaagagcgcccacagcagggttaatgcaatgctgatactgccgaaatcgccgcgcacgccttcgcttaacgtatggacacgcaccagcacaccgtcgaaatggtccagacgttcccagctaacatagcgactgtccatacgaatgccgccccgcgtgtcatgttccattgcctgcgccagcaaggccagttcacgaggatcaaaaatattccctgttggatggtcaggattggaagaggtcaaaaatctcagcttactgtcatagagctgatactcaccatcgaggtttttatcgatggcgtttcttaaaaattgctgcatagtacgcacgggaatactcatccccagcacgccataccagtagttattactgtctaccggaacactgacggtaacctgcggttcagtattgctggcgtgttccggttggctagtgaaccagcgtaccgcgcggtgacgattttctcgttgactatggccaataaaccagggttgggtgacatagccgtaataacgcgttggaacattgcgcgtaaacaaggtcggctgcgtgctaacgtaaaatccggcacggctgacatacatcgcctgttcaaccatgctgctggagttgtgcgctagtcgcagcaagtaaccaacttccagtgcagcggtaatttcattgtcgaggctttcattttcgcgagacaggagattcccctcgctgactaatgcatcgctcacaccattaactggcagagtgcgtcgtcggttgagttcgattttccaggcgtgctcgtcgcgatgctgttcgaactcggttacagcatcacgcagagaggtgaaatccagtggcgctacgagagcttcgcgcatgccattacgtaaaaagatcagtttgtcgacgttatactgcaaatgcttatcgagcgcgttggcaacgttttccagatgattacgctggctggagatataggcatcttccagcaccaccacttcacgccaggtgagcaaggtggaaaaaagcaataccacgataaagcagagattaacgacatgaccaggccccaggcggcgtgcgagttttttcaaccagctctggttttccatttttgtctcgtgctgcaccctgacgactcccaacctgcttttttatgattctggcataacctggcgatagcgtaccgcaaaacagcgataattttataatggtggcatgataagacgcgactatcattcattgcaggcattagcacaccaggccggatgtgatccggcctgatgttaatgataccctttcacacttcttccgcagaacgactcccctcccccggaacaagctcggtttcatgaaaagcttcccgcttgaccccgtaaccgtcataccaacgacactcaaccataccgctggagtatccagtgacaatcatccgcgggccgccctctttaaccgtaacttcctcactaaccataaagctcatactcgcctccttttttcgagtgaaacttgttcaccttagttgaagatggcgaattttgcataatagccagtgcgagtattaatgtgcctgaccgcgcattttctctacggctttcactcccagcaccacgatgccgccgatgataaatccaagaatcagatttaaaacagtcggtaatatcatcgccactactgcactttgctgcccggcgaaatgttcaatggcgtgatgcagcggcgcaattccatgtaccacaatcccaccgccgacgaggaacatcgccagcgtgccgacaatgcttaacgctttcatcagccagggcgcgataatcaataaccctttacctaatgcctgcatcagcgcgctggatttttccgccagccaataccccaggtcatcaatcttaacgataacccctaccagaccgtagacgcccacggtcactaccagcgcgatgccactaagcaccagcacctgattaagcaacggcgcttcggccacaatccccagcgtgatggcgacgatttccgcagacaatataaaatcggtacgaatcgccccttttattttgtccttttcaaacttcagcggatcctgcgccgccagcttctccagacgctgctggctctgcgccggatcttctttatgtttacgcgcctccagcatatgcagcactttctctactccttcaaagcagagaaacgcgccaccaatcatcaacagaggcgtaatcgcccacgggataaacgcactgatgatcagcgccagcggcaccagaatcactttattaatcaggcttcctttcgccacgccccagaccacgggaagttcccggttggcccgcacgccactaacttgttgcgcattgaggcttaagtcatcccctaatacaccggcggttttcttcgccgccagtttgcccatcacggagatatcgtccagtagtgtggcgatatcatcgagcaacgtcagtaaactactcccggccaaaagcattccctctcatttttattgttgaagggtgtaagtatgaagcaaaaacggcagctctgatacttgcttcacaggtcaacatttttttaacaatcaagtgcaattatatctctcgccagcagaatgattttcacgtttactatgaaccacctttttatttccaccgtgagggattatgcgtttccgccagttgttaccgctttttggcgcgctgtttgcgttgtatatcatttggggcagtacctattttgtcattcggattggcgtggaaagctggcctccgttaatgatggcgggcgttcgattcctggcagccggtattttattgctggcatttttgctactgcgcggacacaaactccccccgctacgtccgctgctcaatgccgcgctgattggcctgttattgctggctgtcggtaatggcatggtgacggttgccgaacatcaaaatgttccttccggcatcgccgccgtagtggttgcaaccgtgcccctctttaccctgtgcttcagccgcctgtttggcattaaaacgcgcaaactggaatgggtgggtattgccattgggcttgccggaatcatcatgctcaatagcggtggaaatttaagcggcaatccgtggggcgcgattctgattttaatcggcagcattagctgggcgtttggcagtgtttatggcagccgcattaccttacctgtagggatgatggcgggtgcgattgagatgctggcggcaggcgtggtgttaatgatcgcgagcatgattgcgggtgaaaaactgacggcgctcccttcccttagtggcttccttgcggtcggctatctggcgctgtttggtagcattatcgccatcaacgcttatatgtatttaatccgtaatgtcagtccggctctcgccaccagctacgcttacgttaacccggtggtcgcggtcttgctgggtacgggactgggtggagaaacactgagcaagattgaatggctggcgctcggcgtaattgtcttcgcggtggtactggtcacgttgggaaaatatctcttcccggcaaaacccgtagttgcgccagttattcaggacgcaagtagcgagtaatcaagcgagtaaatgaatcccctgcgtgtcgatctgcgcgctggcaccttcgccgcagatccactcttccagacgctcggtaagcgcttcatccgtcagcttctcgcgcccacgtaacgcgcactcccagacaatcaatacgcgccagccgagttcctgcaagcgactgatatcgcggcgatcgcgctcaacatttttacctatcttctccagccagaactcggttcgagtcgcaggcactttaaacagatagcagtgatgatgatgccagaagcagccatgggtaaatatcacgcagcgatattcatcaacgacaaaatccggacgtccgggcagactggcgtcctgaacgcgaaatgccaggccctgcccggttaacagactggcgaggcgcttctctatcgccgtatcacgcgtggcaatcgcgcgcatatttttgctgcgagtggccttatcgtgaacgtcggccatgttgtgcctcttgctgacgcttagttatcgactacgtcggccatgttgtgcctcttgctgacgcaacgccaccgcctgtttgatttttggctcaagcagttttgccaccgcggcaaagaccggcacgaccacgctgttaccgaactggcgataggcctgagtgtcgctaaccggaatacggaatttcgcttctcccggcgcttcaaaacccattaagcgcgcgcattcccgaggcgttaaccgacgtggacgatgttgctgattcagcggatcgtcaaagtctttctcacccgtggccatatcccagccgcgatcgattaaaatttccgcgccatctttgtaataacgcgcagacagcgtacgcgtgacgctttgcggattgttcggataaaccattccataaccgaagccgttaccgcgcgcctgatgttttttcgcatatcgatagaggtacttccacagcaccggcgtcaggatatatttcgcctcgaccatcgggtccaacagctgcgccagcgtcactcgctgcgcagggaaacattcgctgatatcacgcagggtaaaatcggctttcagattcagatcgcgacgaaaacccaccagcacgatgcgttcacggtgctgcggcagaaaatgtttgccgtcgatgattttcggatcgtctggcccattatcttctgcatcagccacgtcatagcccagttcgtccagcgtctgcatgatgatgcggaacgttttaccctggtcgtgacttttcaggtttttgacgttttcgagcacaaacatcgccggacgacgcgcgtcgataatgcgtaccacatcaaaaaacagcgtgccctgggtatcgcaggcaaaaccgtgcgcccgcccgaggctgttctttttgcttacgccagccaggctaaatggctgacaagggaaaccggccagtaaaacatcgtgttcaggaatgtgttgacgaatatgttccgccgccgcctcatcactcacgccttctttatggctgagggtgatgtcgcggatatcttcattaaaatgatgcgtcgccggatcgcaataatggttggctttataagtgcgtaccgcatgtttgttccattcgctggtaaacacgcactgtccgccaatgctttcaaaaccgcgacggatgccgccaattccggcgaatagatcgataaagcgaaacgcataatgcggatgatgtgccggtggtttgggtaataacgtttgcagatgggcgaactctttctcacttaaacggtgccatgcgctgtcattcgccagcgcacgttttaaaattgccgcgctccagtgattctcacctacaccattaagctgcgccaccaacgttttaacatcataaatttgcagcagtttctccagcattgcctgtgcggcattcccggtgctgtaactatcggttacacttatattttcctgcatagatttcaccggccatctgagatggccgacaggttaacataattacagccatttagggccacgcgctcagccagcggaactaaacgcatctatcaccttgtgatcgacaccttcattctcccccgccagttcggcactgagcttcgccataaactcgactaaaaaatgcgcgttgtgctgcgccagctgcttgcctcttgcggtttgcatggtttgcggtagcttcagcaacttagtctggaaatgatccagcgcgtagcgtttatcatcaagcgggcgatgctgtgcgaacggatcttcaccatcaaacagcgccacgcccaatgccccactaacggcaaacacgcgcgccaggccaatcgcccccagggcttccagccgatccgcatcctggacaattttagcttccgttgttaagggggcgatttgcgcgctgaaactgtgagcggcaatggcatgacaaacggcctcgattttctccgccggaaattgctcgaactcttcacggagcaggcgacgcgtctcttctgccgccaggatactagaacgctgcctttgcggatgatttttcgccaggctcacaatatcgtgaaaataacaggcggttaaaatcaccagcatatcgacatcgtcatctgccgccagcttctgtgccgtagcccagacgcggcgaaaatgacacacgtcatgggccgcgtcctggtgctgatgatggtttttcaaccagttttcgaactgtgcctgccagtgttgtaagtccatacgcgctccgttgccaaagagtcgccaccttagcagtttttattcatagcgtctgctacgtgcgggacgaggtcgggtgtaccaggcaatgctgcctaacaatgccccgaccagagccataaataaaaatccgaccagtgcccctaaccactttcccgcggtagagcctaaatcgctttcaaatccgctcacgggggcatcgggaatccggctcatcacccagatgtaacgcgccattgcccagacgaaatagccacaccatgtatagaaagcccacaaagccagtttgccgccagggctgcgagagagtctctcttccatctttgtgctaccgtattccattttgagataacccggaaaattcagacttagtactattatgtgataaaagtcacatttttccacattggatgagccagtcaagactcaatcattttttgaacaaatagataaattttgcgcaacggcagtgaatacaggaaaaatcgttttgagcgattttatttatctttgatatcggctttattaattcatttaatcaatatattagcactgattacaattatacctttttattattctgtgtcatgatgcttccgttattagccttttatcgtcttgtttatattttttgggccggcatgatgccggcttttttttatgccttcattaatgtgcgcctgatcacaccagccgtttggcgcaacaatcattgataccccctatgtttccgctcaactcataacatattgatatacatttataattttcatgaatatttatatttagaattcataattatgaattatattaaatagattagaaacattttgatatcttttaaatacatttgttacatgtaatccttaaaataaaatgaacttcatagaatagtatccaaatgtgcttttttttggataacggcacttattgatatattcatgaagattataatcacaagggaatacataatgaaaagaaaagttctggcaatgctggtcccggcgttattagttgctggcgcagcaaatgcggctgaagtctataataaagatggtaataaactggatttgtacggaaaagtagtgggtctgcactacttctctgatgattctggcagcgatggcgacatgtcatatgcccgtatcggtttcaaaggtgaaactcagatcgctgatcaattcactggttatggtcagtgggaatttaacattggcgcaaacggtcctgaaagcgacaagggtaataccgcaacgcgtctggcatttgcaggtttaggctttggtcagaatggtactttcgactatggtcgtaactacggtgtcgtatatgacgtagaagcatggaccgatatgctgccagaatttggtggcgatacctatgctggcgctgacaacttcatgaacggtcgtgctaatggtgttgcaacctaccgtaacaatggcttctttggttaggtcgatggcttgaactttgctttgcaatatcagggtaataatgaaagtggtggaccattcgggcaggaaggttccggtagtggtgatggccgtagcctttccaaagaaaatggtgatggtttcggtatgtcaacatcctacgacttcgacttcggtttaagtctgggtgctgcatatcaaactctgatcgttcagatcgtcaggttggagttggtttaaatgatcgtaaccatagcaacagaaatgctggtggtgaaaccgctgaagcatggactgttggtgcaaaatatgatgctaataatgtgtatttagcagctatgtacgctgaaactcgcaatatgaccccatatggtggtggcgagtttgataatggtgaatcaagatcagccatcgctaacaaaacccaaaactttgaagttgttgctcagtatcagttcgactttggcctgcgcccgtccatcgcttacctgcaatctaaaggtaaggatttaggcggttgggctcatgacggcaacggcgacccacgttacaccaataaagatctggttaaatacgttgatattggtgcgacctactacttcaacaaaaacatgtccacctatgttgattacaaaatcaacctgctggacaacgacgatgacttctacgaagcaaacggcatcgctaccgatgatatcgttgctgtgggcttagtctaccagttctaatcagtcaactcgctgcggcgtgttactgtaaaactgaacactagcctgagttcgtccctcatcgaactcaggcttttttattggcatttcatctccatctgcggcacacgcaattgccgaagcatatcgatacagcaccttaccctgcccctcctggcacaataacatcaaccagctactcttcaagctaacacccaaatgcatttctttatgaattaatccgtaacaaacacgcttcccatatagaaatatttgcaaaaatagtgcatgaaataagctttttctctaccaatccgggatataaatattcatcagcaccacaatattccacagcactaaatctctccccgccaccccgtacctctgataatggtctaaaatcattgaagccacttgcgacgacgttgctcaataaggaaaatttggcgtgaataatattcaacaccagtgcagcatcatcattacatacttacagccgccgactaccgctttcgatatattgactcaattttccagcctggttaaaaatagcgaccagctcagtcgcaaatatagtgactaccctaactaagcaacaataaggaatacactatgactgttcaaacaagtaaaaatccgcaggtcgatattgctgaagataatgcattcttccctagtgaatatagccttagccaatataccagtcctgtctctgatcttgatggcgtggactatccaaaaccttatcgcggtaaacataaaattctggtgatcgccgcggacgaacgttatttgccgaccgataacggaaaactgttcagcaccggtaaccatccgattgaaacgttgctgccgttgtatcatctccatgctgcaggtttcgaattcgaagtggcgaccatttccggtctgatgaccaagtttgaatactgggctatgccgcacaaagatgaaaaagtaatgccattctttgagcagcataaaagcttgttccgcaatccgaagaaactcgcggatgttgttgccagcctcaacgctgatagcgaatatgcagcaatctttgttcctggtggtcatggcgcacttattggtttacctgaaagccaggacgtggctgccgctttacagtgggcaatcaaaaatgaccgttttgttatctccctttgccacggcccggcggcttttctggcgcttcgccacggcgataacccactgaatggttattccatttgcgcattcccagacgccgcagacaaacaaacgccagagattggctatatgccgggtcatctcacctggtacttcggcgaagaactgaagaaaatgggcatgaatatcattaatgacgacatcaccgggcgagtacataaggaccgtaaacttctcaccggcgacagtccttttgcagcgaatgcgttgggtaaactggcggcgcaggaaatgctggcagcttacgcgggttaatccctgttacgtttgaatgtaagcgcataatcaatcgcggccgcgttagtactcacgacgtggctgcgttttttcacggttaatttatggcgtactgaagccctatgttaatttctttgcggtaacgtaatccggaacacattatgcttattgagatagtgatacgtagcacttcccccatgcaattcggcaatcgctttgactaaagaaaggcctagtccctgacctacggaatgacggctattatctccccgccaaaatctacggaagagtttttcaggctcattaattttcgttccagggctggcgatatcaatattaagatagctgttggtatcaagaaaactggttatatgaatacggcttttttctgggctatatctaatggcattaacaataagattgcttaacattcgttgtagtaaaattttatccgcaaagatttgctgattgcactcgaccttaaagcaaatctctttctcgtcactaaggtattcaagatagtccaacaaattttcgacttccttattgagagaaaggctgtccagtttcaccaaaacattgtttttatctgccctggcaagaaacagtatgttctctgttaaccggctaatattttccagctcttcaatgtttccggcaattgttttttgatattcagcgatacttctggtttgactgagcgtaacctgattctgacccagtaatgcattaattggcgttctaagttcatgagcgagatcgtcagcaaactgacttagacgctcaaaatctttgactaaagcatgatgcattttattcaacgcctgcccaagaggttttagttctctcggtaatgcgctaacctcaacaggctctcggctatcgttataattcagcgcttccgttacaccactcaactttttgatctctcgtaatcccgttctgattaacagcggacttaatacactgcaaagtacaatggcgacaatgcaaattataatgctattaattttatactgttcaagcatgttatgtctggcactagccaatttagccacagtaaccgttaaacttgggctaacttcatcaatattaattcgtaaagcatctatctctgtatcattaataatgcttctgtaaatgccagctgcgctgattgtctcactagcaggtatgttatttaacatgccatcactgacatttgtccggttaacaattttattgatgctatcaccatgaataatcaagatatcctgactaacatccatcatccggttaaagtacacaggtaacgtatctggatttaccccatcaattaacaactgcttgatctgcgctgtccggttaatgagtgttgtatcatcgcgccatttcaactcacttgccaggccattatagagagtccagacaattccggcgccagcaacagacagtagcaatataaaaagcaaggttaaacggacggttatagatagtcttttcattatttttttaccgctacgaaactatagcccatcccccggattgtggcaattagcttttcaggaaaaggatcatcaacttttgcgcggagcctgcgaatggcgacgtccaccgtattggtatcactatcaaagttgattccccaaatttcactcgcaataaccgttctgggtataatttcgccagctctggaggccagtagccaaagtaactgaaactccttgcgcgtcagtgtaatactgatattgtccctgctcacactatgactaacagagtccattcttaagccgctgatttctaatgtactattcaaagcgtgatgttgccttaattgtgcccgaacccttgccagcaactcagaaaaactaaaaggttttaccagataatcatttgccccactgtccagccctctgactctgtcatcgacagaatcccttgcagtaaggcaaataacaggggtttgctttgctgttcttaacgtttgtaagatctgccagccatccatacccggaagcataatatccagaatgatcaatgcataatcatccttcagcgcaagataaagcccatctctgccatcagaaacggcatcgatgacataacccgcttcggaaagcccctgcgttacccattcctgggtcctttgattatcttcaataagtagaatcttcatgaaaataatatgccataaatcatatgttatagaaacagcctggttcattacaaaattgtaatgctgctgtaaggttaccctggacgctttttcgctatcctcaaaactcattcacatgacaaggatataaacatgttaaagcgttatttagtactcagcgtagcaacggcagcatttagtttaccttctttggttaatgccgcacaacaaaacattcttagcgtgcacattttgaaccagcaaacaggaaaacccgctgctgacgtgacagtcactcttgaaaagaaggcggataacggctggttacaacttaataccgccaaaacagataaggatggacgaattaaggcactgtggcccgagcaaactgcaactacgggcgattaccgtgtcgtatttaaaaccggggactatttcaagaaacaaaatcttgaaagtttcttccctgagatccccgttgaatttcatattaataaagtgaacgagcattatcatgtgcctttattacttagccaatatgggtatagtacctatcgtggcagttaatgcataaatatgtaaaagcagatctctgctactgttagggaggacactccctgacagattaacagtaaacggctcttgctggctaacgacaaaaaagtgtgatggcttatgaaaaagaatcaatttttaaaagaaagtgatgttacggccgagagcgtattctttatgaagcgtcggcaggtgttaaaagcactgggcatcagtgcaactgcactttctttgcctcacgctgcgcatgccgatctgcttagctggtttaaagggaacgatcgcccgcccgcccccgccggaaaagcgctggagttcagcaagcctgccgcctggcaaaataacctgccactgacgccagcagataaagtttccggttataataacttctatgaattcgggctggataaagccgatcccgccgctaatgctggtagcctgaaaaccgatccatggacactgaaaatcagcggcgaagtggcaaaaccattgaccctcgatcatgatgacttaacccgtcgcttcccgctggaagagcgtatttatcgtatgcgctgcgtggaagcgtggagcatggtggtgccgtggattggttttccgctgcacaaattgctggcgcttgccgaacctaccagcaatgcgaagtatgtcgctttcgaaacaatttatgcaccggaacagatgccaggccagcaggaccgctttatcggcggtgggctgaaatatccttatgtcgaaggattgcgtctcgacgaagcaatgcatccgctcacactgatgaccgtaggtgtttatggcaaggcgttaccgccacaaaatggcgcgccggtgcgactgattgtgccgtggaaatatggctttaaagggattaaaagcatagtcagtattaagctgacccgcgagcgtccgccaaccacctggaatctggcagcgcctgacgaatacggtttttacgccaacgttaatccgtatgttgatcacccgcgctggagtcaggctaccgaacgatttattggtagtggcggcatcctcgatgtacagcgccagccaacgctactgtttaatggttacgccgcccaggtggcaagcctgtatcgtggcctggatttgcgggagaatttctaaatgcgtctgacagcaaaacaggtgacatggctgaaagtttgcctgcatcttgccggattgttgccgtttctctggctggtctgggcgatcaatcacggtggactgggtgccgatccggtgaaagatattcagcattttactggtcgcactgcactgaaatttttgctggcgaccttgttaatcacccctctggcacgctacgcaaaacagccgttattgatacgcactcgccgcctgttaggattatggtgctttgcctgggcgacactgcatttaacaagttacgcattgctggagctgggcgtgaataatctggcgttattaggtaaggagttaattacccggccttatttaacgttaggtattatcagctgggtaattttgcttgctttagcgttcactagtacccaggcgatgcagcgaaaactcggcaagcactggcaacagttgcataatttcgtctatcttgtcgcgattctggccccaatacattatctgtggtccgtgaagattattagtccgcagccgctcatctacgctgggctggctgtactgcttttagccttacggtataagaagttgcgttccctttttaaccggttacgcaagcaggttcacaacaaattatctgtataacttcatattgccgacaaagtacgcgttatccctgccggatgtggcgcgagcgccctatccggcatacacagatcgcatcaggttatgtttcgtttgtcatcaacctcaaatcaccaaaataatttattttatttcaataagatagataagtagaactgagaaagccatgctctcgtttcctaagagttgttgcattttgctatatgttacaatataacattacacatcatatacattaactctggaggaaactgttttggcgattcgtctttacaaactggctgttgctttaggtgtctttattgttagcgctcctgcctttagccatggtcatcacagtcacggcaaacccttaacagaggtcgaacaaaaagctgctaatggtgtttttgatgatgccaatgtacaaaaccgaacgctcagtgactgggatggagtctggcaatccgtttatcctttactgcaaagtggcaaacttgaccccgtctttcagaagaaagcggatgcagataaaactaaaacatttgctgaaattaaagattattatcacaaaggttatgcaacagatatcgagatgattggcattgaggacggcattgttgaattccatagaaataatgaaacaacaagctgtaaatatgattacgatggatacaaaatactcacctataaaagtggcaagaaaggcgttcgttacttattcgaatgtaaagatcctgaaagcaaagcccctaaatatatacaatttagcgatcatataattgcaccacgaaaaagttctcattttcacatttttatgggtaatgatagtcagcaatctttattaaatgaaatggaaaactggccaacgtattatccatatcagttgagtagcgaagaagtggtcgaggaaatgatgtctcattgagtattctcatgataacgcctcgatgccgctttagtaagttatcataactgccactggtccatccacaaacgccactgaacgcaagctagctacagacacgctcatcactatgacgtgtctgtatattaataagctaacccgcattgagttaaccaataacggattccatacacaatacggccaacagagaaagatacctgtgctcacgccattgcttatattggctggttacaatatgcactatcaattttttaaataacaaattattaaaaccacatctgtataaggaatttttaaggttcgtgggatagcttgactgtgaaaatcacaggagctacaaaaatgaaccgattcagtaaaactcaaatttatttacattggataacgctgcttttcgttgcaataacctatgccgcgatggaactccgtggctggtttcctaaaggtagtagtacttatctgctgatgcgagaaacacattacaatgcgggtatattcgtttgggtgttaatgtttagtcgcctgattataaaacaccgttatagtgatccttctattgtgccaccgccacctgcctggcaaatgaaagcggctagcctaatgcacatcatgctttatataaccttccttgcacttcctctgctggggattgctttgatggcttacagtggaaaaagctggagtttccttggtttcaatgtgtctccctttgttaccccaaacagcgaaattaaagcactgataaaaaatattcacgaaacctgggcaaatataggctactttttaatcgcagctcacgctggcgcagcactctttcatcactacattcagaaagataatactctgttacgaatgatgcctcgccgcaaataagtcgatccccttacaaggaaatgtgaaccatggacatcaacgcgtcataaatgtttacgcaagtgcacaatgcaccctttccactatcaacaaggaggagcagaaactgtgtaaatcgtacaatggtaagacttatcaaaaatacaggttaattttggtatttaaaccttttttacttgttagtatgatacaaaggctttcaaaaaagctgcgaaattcaacaactcttggaaattatggactttgtcccgcggctttaatctgacggccgcgttccttttttgactcaattattgaacccttctctacgcaacttcagttcccaccaccaactttgcggcagtttcataggatgaatgtctaaaagaataatggtgagcgataagaaaacgactgaataactgcacattttcgctcgaaagcttcctgtcagatccatagcgaatcaagtgctgaatgtcacagtatcgaacagaaaacagtgacgatctaacccttcaagaatattctacgattgttctgtttaggaaaagcaaggcgggaagtcgggagataagtcattgataaagtggcggagagagggggatttgaacccccggtagagttgcccctactccggttttcgagaccggtccgttcagccgctccggcatctctccgttcagatggttgccatgatgccaggaaatttggcattttaacagtccctgtccgtgcaattttgttcaagtgacgagtttgcgagcaaaacgatgattaagtggccctggaaagtacaagaaagtgcacatcaaactgcccttccctggcaggaagcactaagcatcccccttttaacgtgtctgacggaacaggaacaaagcaaattagtcactcttgccgaacgttttttacagcaaaagcggcttgttcctttacagggctttgaactggatagtttaagaagctgccggatagcacttctattttgcctacccgttctggagttaggactggaatggctggatggttttcatgaagtcttaatttatcctgcgccatttgtggtcgatgatgaatgggaagacgatatcggtctggtgcataaccaacgtattgttcagagtggtcagagctggcagcaagggcctatcgttttgaactggttggatatacaagattcttttgatgcttctggttttaacctgattattcatgaagtcgctcataagctggacacccgtaacggcgatcgcgccagcggagttccctttattccgttgcgtgaggttgctggctgggaacacgatcttcatgctgcaatgaacaacattcaggaagaaatcgaattggttggcgagaatgcggcgagcattgatgcttatgcagccagcgatcctgctgaatgttttgccgtactttctgaatatttctttagcgccccagaactttttgctcctcgtttccctagtttgtggcaacgtttctgccaattttatcaacaagatcctttgcagagactgcatcacgctaatgatacagacagctttagcgcgacgaatgttcattaattaacaactttgcagattaattaaccaattgaaatgacttatgaaatttagtgttgacagacaaggtaccgctaagtaatattcgccccgttcacacgattcctctgtagttcagtcggtagaacggcggactgttaatccgtatgtcactggttcgagtccagtcagaggagccaaattctaaaaattcgcttttttagcgcaatgtcactgaccttagttgaacattgttttttaacggatagcgggtttttaacatcttaagcgccctcgacctttatggttgagggcgttttgctatgaacgccatcaccattttcccctcgattataaaacttgagttattcagtagtctcccctcttgcaactcacacccaaaactgcctaacgaaaagttattaattttcaatcatattgctatcagtatttacattttttcgctgtgctagaaagggcgcatttatgttagctcgtagtgggaaggtaagcatggctacgaagaagagaagtggagaagaaataaatgaccgacaaatattatgcgggatgggaattaaactacgccgcttaactgcgggtatctgtctgataactcaacttgcgttccctatggctgcggcagcacaaggtgtggtaaacgccgcaacccaacaaccagttcctgcacaaattgccattgcaaatgccaatacggtgccctacacccttggagcgttggaaagcgcccaaagcgttgccgaacgtttcggtattagcgtggctgagttacgcaaactcaaccagtttcgtacgtttgctcgaggttttgataatgtccgccagggtgatgaactggatgtcccggcacaagttagtgaaaaaaaattaaccccgccgccgggtaatagcagtgacaacctcgagcaacagatagccagtactagtcagcaaatcgggtctctgctcgccgaagatatgaacagcgagcaagcggcaaatatggcgcgtggatgggcctcttctcaggctagtggcgcaatgacagactggttaagccgcttcggtaccgcaagaatcacgctgggcgtggatgaagattttagcctgaagaactcccagttcgattttctccatccgtggtatgaaacgcctgataatctctttttcagtcagcatactctccatcgtactgacgagcgtacgcagattaacaacggcttaggttggcgtcatttcactcccacatggatgagcggcatcaacttctttttcgaccacgatcttagccgttaccactcccgcgccggcattggcgcggagtactggcgcgactatctaaaattaagcagtaacggctatttgcgactgaccaactggcgcagcgcacctgaactggacaacgattatgaagcacgcccggccaatggctgggatgtacgcgcagaaagctggctacccgcctggccgcaccttggcggtaaactggtctatgaacagtattatggcgatgaagtggccctgttcgataaagacgatcggcaaagtaatcctcatgccataaccgctggacttaactatacccccttcccgctgatgaccttcagcgcggagcaacgccagggtaaacagggcgaaaatgacacccgttttgccgtcgattttacctggcaacctggcagcgcaatgcagaaacagcttgacccgaatgaagtcgctgcacggcgtagccttgcaggcagccgttatgatctggtggatcgcaacaacaatatcgttctggaatatcgcaaaaaagaactggttcgcctgaccctgacagaccccgtgacagggaagagtggagaagtgaaaagtctggttagcagcctacaaaccaaatatgccctgaaaggctataacgtcgaagccaccgcactggaagctgccggtggcaaagtggtcacaacgggtaaagatattctggttaccctgccggcttaccggttcaccagtacgccagaaaccgataacacctggccgattgaagtcaccgccgaagatgtcaaaggcaatttgagcaatcgtgaacagagcatggtggtcgttcaggcacctacgctaagccagaaagattccagcgtaagcttaagtacccaaacattgaacgcggattcccatagtaccgccacactgacttttattgcgcatgatgcagcaggtaatcctgttgtcgggctggtgctcagcacgcgtcacgaaggtgttcaggacatcaccctttctgactggaaagataatggtgacggaagctatacccagatcctgaccacaggagcgatgtctggcacgctgacgctgatgccacagctgaatggtgtggatgcggctaaagcccccgccgtggtgaatatcatttctgttagcagttcccgaactcacagcagtattaagattgataaggaccgttatctctccggcaatcctatcgaggtgacggtagaactgagagatgaaaatgacaaacctgttaaggaacaaaaacagcaactgaataacgcagtcagcatcgacaacgtgaaaccaggagtcactacagactggaaagaaaccgcagatggcgtctataaggcgacctataccgcctataccaaaggcagtggacttactgcgaagctattaatgcaaaactggaatgaagatttgcataccgctggatttatcatcgacgccaacccgcagagtgcgaaaattgcgacattatctgccagcaataatggtgtgctcgccaatgagaatgcagcaaacaccgtcagcgtcaatgtcgctgatgaaggaagcaacccaatcaatgatcataccgtcacgtttgcggtattaagcggaagcgcaacttccttcaacaatcaaaacaccgcaaaaacggatgttaatggtctggcgacttttgatctgaaaagtagtaagcaggaagacaacacggttgaagtcacccttgaaaatggcgtgaaacaaacgttaatcgtcagttttgtcggcgacagcagtactgcgcaggttgatctgcagaagagcaaaaatgaagtggttgctgacggcaatgacagcgtcacaatgaccgcgaccgtccgggatgcaaaaggcaacctgctcaatgacgtcatggtcactttcaatgttaatagtgcagaggcgaaactgagccaaaccgaagtgaatagccacgacgggatcgccacagctacgctgaccagtttgaaaaatggtgattatagggttacggcctctgtgagctctggttcccaggctaatcaacaggtgaattttatcggtgatcaaagtactgctgccctgaccctcagtgtgcctagtggtgatatcaccgtcaccaacacagctccgcaatatatgactgcaaccttgcaggataaaaatggcaacccactaaaagataaagaaatcaccttctctgtgccaaacgacgtcgcaagtaagttcagcattagcaacggaggaaaaggcatgacggatagtaacggggttgcaatcgcctccctgaccggcacgttagcgggcacgcatatgatcatggctcgtctggctaacagcaatgtcagcgatgcacagccaatgacgtttgtggcggataaagacagagcggttgtcgttttgcaaacaagcaaagcggaaatcattgggaatggcgtggatgagacaactctgacagcaacagtgaaagatccgagcaatcatccggtggcggggataacggtaaacttcaccatgccacaggacgttgcggcaaactttacccttgaaaataacggtattgccatcactcaggccaatggggaagcgcatgtcacgctgaaaggtaaaaaagcgggcacgcatacggttaccgcaacgctgggtaataacaataccagtgatagccagccggtaacatttgtggcggacaaagccagcgctcaggttgtcctgcagataagtaaagatgagatcacaggtaatggcgtcgatagcgcaacgctaactgcaacggttaaagatcagttcgacaatgaggtgaataatcttccggtaacattcagcagtgcctctagtggactcaccctgaccccgggagtaagtaataccaacgagtctggcatcgcgcaggccactctcgcaggcgttgcctttggtgagaagacggttactgcaagtctggctaataatggtgccagcgacaacaaaactgtgcattttattggcgacacagcggcggcaaaaattatcgagttggcgcctgtcccagacagcataatcgccggtaccccgcagaacagctccggcagcgtcatcaccgccacagtcgttgataataatggctttccggtgaaaggtgtgactgtgaacttcaccagcaacgcagcgacagccgaaatgacgaacggcggtcaagccgtgacgaacgaacagggtaaggctaccgtcacttataccaatacccgctccagcatagaaagtggagcgagaccggataccgttgaggccagtctggaaaatggtagctccacgcttagcacaagtattaatgtcaacgctgatgcgtctacggcacatctcaccttgctacaggcactttttgatacagtctccgcaggcgagacaaccagtctgtatattgaggtgaaggataattacggcaacggtgtcccccagcaggaggtaaccctcagcgttagtccaagtgaaggcgtgacccccagtaataacgctatatatactaccaaccacgacggcaatttttacgcaagctttaccgctacaaaagccggggtttatcaattgacggcaaccctcgaaaatggcgatagcatgcaacaaacagtgacctatgtgccgaacgtcgcgaatgctgaaatcacgctggcagccagcaaggatccggtgattgccgacaataacgatctcacgacactaacagcaacagtcgctgatacagagggcaatgcgatagccaacactgaggtaacatttactctgccggaagatgtgaaggcgaacttcacgctgagcgatggcggtaaagtgattactgatgctgaaggcaaagcgaaagtcacgctgaaaggtacaaaagcaggcgctcatactgttacagcaagcatgactggcggtaagagtgagcagttggtggtgaactttattgcggatacgctcactgcgcaggttaatcttaacgttaccgaggacaattttatcgctaataacgtcgggatgaccaggctgcaggcaacagtgactgatggaaacggcaacccgttagccaatgaggcggtgacattcacgctaccggcagatgtgagcgcaagctttactctcggacaaggcggttccgccattactgatatcaacggcaaggctgaagttacactgagcggtacaaaatccggcacctaccccgtgacagttagcgtgaacaattatggtgtcagtgatacgaaacaggtgactttgattgccgatgctggtaccgcaaaactagcctccttaacctctgtatacagtttcgtcgtcagcacgaccgagggcgcaaccatgacggcaagcgtcactgacgctaacggcaacccggtagaaggcataaaagttaatttccgcggaacctccgtcacgctaagcagcaccagcgttgaaacggatgatcggggtttcgctgaaattcttgtgacaagcaccgaggtcggactgaaaacagttagtgcctctctggcagataaacctactgaagtcatcagccgattactgaatgccagtgcagatgttaattctgcgacgattaccagtctggagataccggaaggtcaggtaatggtcgcacaagacgtagcagttaaagctcacgttaacgaccagtttggcaacccggttgcgcatcaacccgtgacattcagtgcagagccatccagccaaatgatcatcagccagaatacggtctctactaatacgcagggtgtagccgaggtcaccatgacgcccgaaagaaacggtagctatatggtgaaagcatccctgccgaatggagccagtcttgagaaacaactggaggctattgatgaaaaactgacactcacggcgtccagtccgcttatcggtgtctatgcccctacaggcgctactctgacggcaacgctaacctctgcaaatggcactccagtggagggtcaggtcatcaactttagcgtaacgccagaaggggcgacgttaagtggcggaaaagtgagaactaactctagtggtcaggctccagtcgttttgaccagcaataaagtcggtacatatacggtgactgcatctttccataacggcgtaacaatacagacacagacaaccgtgaaagtcactggcaacagtagcaccgcccatgttgctagctttatcgctgatccaagcactatcgccgccaccaacactgatttaagtaccttaaaggcaacggttgaggatggcagtggtaacctgatcgaaggtctcactgtgtacttcgccttaaaaagcggctctgccacattaacgagtttaacagcggtgaccgatcaaaacggaatcgcgacaacaagcgtgaaaggagcgatgacaggtagcgtcacggtaagcgcagtcacgaccgctggtggaatgcaaacagtagatataacgctggtggctggcccggcagacaccagccagtccgtccttaagagcaatcggagtagtctgaaaggggactataccgatagtgctgaattacgtcttgttctgcacgatataagtggcaatccgatcaaagtttctgaagggatggaatttgtgcaaagtggtactaacgtgccctatataaaaattagcgcaattgattacagtctaaatatcaacggtgattacaaagccactgttacaggaggcggagagggtatcgcaacgctgatccctgtattgaatggtgttcatcaagctggtctgagtaccacaatacaattcactcgcgcagaagacaaaataatgagcggtacagtaagtgtcaatggtactgacctaccgacaactacattccctagccaggggttcaccggggcgtattatcagttgaataatgacaactttgccccaggaaaaacggcggctgattatgagtttagtagctctgcctcctgggtcgatgttgatgctaccggtaaagtgacatttaaaaatgtcggcagcaatagcgaaaggattacggcgacgccaaaaagtggaggccctagctatgtatacgaaatccgtgtgaagagttggtgggtgaacgccggcgaggctttcatgatatacagccttgctgaaaatttttgcagcagcaatggctacacgctccccagagcaaactatttaaaccactgtagttcccgaggcatcgggagtctgtacagtgaatggggagatatggggcattacacgactgacgctggttttcaaagtaatatgtattggagttctagtcccgcaaacagtagcgaacaatacgtagtttccctggcaacaggtgatcaaagcgtatttgaaaagcttgggtttgcttatgcgacatgttataaaaacctgtgattttccgttataatttcttaaagagtgttccattcggggcactcttttttacattccctctacagaactagcccttctctcacagaaaatgaataaataaaaatgcggcaccgccagaatcgcgttcgatgtgactatgatcattttcggtgagtactgctttgatctaaaggctggttttctgtgatgattgaccagcctcagagtattgatgacaccaccgttcataacagatcggcattactatgcataagtactgtctcatattctcgccaaaacactttttaatgcctttgcgaattcatccagacttatattgtcaattttttgcccaacgacgactgactccgagacatcggccattgcgggccatcgcgttttgtaatcagcataaattgcaacaacaggggtattataggcacttgccatatgtaatattgaggtgtcaggagttattgcgatataagcatcttttatgattgctgctgaacgtttaatcgagggtggtaaggataaacggtagacattattataacaatccactaatgccctggctttatcttcacctttgggtccatgaacgatcactattggtatatctgtttcactttaaatttttgctattagattttctgcaatcgataatgaaaatgtacgttcctgcgagctaccttctaaattgaacgcaatgtaagatcctaacgatcgcatttcctcgcgcacctcatcgagtacatcctcacttagtggcaattcatatattggcctgactgctggaaaacccgcctcacgcatcataaatgcccatgtcataggtacgggagcccggagtttctgatccatactggacgcgttcttgcacaaaggggagaagcaattcatggttataccaacaacctgaaaattcgtttttgctttcaactgactgataaataacatcgttttcaggttctttttacgcatcccctcaatgcaaagatccggcgtaccgtattgctgtgttatgttctttgctaaatcttttatttcttttaatgttgcgtgatcctgcatagtcattgtgactaatgttaatttagtctgttcaagtttaagcgcattaaagacttctaaattaattgtcgacgttacaattaaaagatgcttaattttatgcaattcaagcgcccgaataacaggaaagatggccatagcatcgccaatctgatcgggaatatggatgacaacaaagtctgttttttcaatattgaaattataagctttataatcgtagtaactaaatgcaatacgtctcaacaatgatgctaaaaacatacctaacctcgcctccctactggttataatgcaatgcagtctatcagactcatcagggtgccattttgtgcatatgcggacttttatgtttcatatctctaacctgtgggtcctctgcttaatccttaaacaacaccagcaactcctgcgctttcatcttccatcgaatttttcatgttgccgctaatcagccataaaatcatttgcagatgcgctctgtcgaggtagtctcataaggttcgtttatagatcgacggcaatgtgagttaccttttccatactaattataaaaagacagtacaaacaggatcattatggactccacgctcatctccactcgtcccgatgaagggacgcttagcttaagtcgcgcccgacgagctgcgttaggcagcttcgctggtgccgtcgtcgactggtatgattttttactctatggcatcaccgccgcactggtgtttaatcgcgagtttttcccgcaagtaagcccggcgatgggaacgctcgccgcatttgctacctttggcgtcggatttcttttccgtccgctcggcggtgtcattttcggtcactttggcgaccgactgggacgtaagcgcatgttaatgctgaccgtctggatgatgggcatcgcgacagccttgattggtattcttcctagtttcagcaccattgggtggtgggcacctattttgctggtgacactgcgtgccattcagggatttgcagtcggcggcgaatggggaggcgcggcgttgctttccgttgaaagtgcaccgaaaaataaaaaagccttttacagtagcggtgtacaagttggctacggtgtaggtttactgcttagtaccggactggttagtttgatcagtatgatgacgactgacgaacagtttttaagctggggctggcgcattcctttcctgtttagcatcgtactggtactgggagcattgtgggtgcgcaatggcatggaggagtccgcggaatttgaacaacagcaacattatcaagctgccgcgaaaaaacgcatcccggttatcgaagcgctgttacgacatcccggtgctttcctgaagattattgcgctacgactgtgcgaattgctgacgatgtacatcgttactgcctttgcacttaattatagtacccagaatatggggctaccgcgcgaacttttccttaatattggtttgctggtaggtggattaagctgcctgacaattccctgttttgcctggcttgccgatcgttttggtcgccgtagggtttatatcacaggtacgttaatcggaacgttgagcgcatttcctttctttatggcgcttgaagcacaatctattttctggatagttttcttctccataatgctggcaaacattgcgcatgacatggtggtgtgtgtgcaacaaccgatgtttaccgaaatgtttggtgccagttatcgctatagtggcgctggagtcggttatcaggttgccagtgtggttggcggtggatttacaccttttattgccgctgcactcatcacttactttgccgggaactggcatagcgtcgccatttatttgctggctggatgcctgatttccgcaatgaccgctttgttgatgaaagacagtcaacgcgcttgatagcctggcgaagatcatccgatcttcgccttacacttttgtttcacatttctgtgacatactatcggatgtgcggtaattgtatggaacaggagacacacatgaataataagggctccggtctgaccccagctcaggcactggataaactcgacgcgctgtatgagcaatctgtagtcgcattacgcaacgccattggcaactatattacaagtggcgaattacctgatgaaaacgcccgcaaacaaggtctttttgtctatccaagtctgaccgtaacctgggacggtagcacaaccaatccccccaaaacgcgcgcatttggtcgctttacccacgcaggcagctacaccaccacgattactcgccctactctctttcgtagctatcttaatgaacaacttacgttgctgtatcaggattatggtgcgcatatcagtgtgcaacccagccagcatgaaatcccttatccttatgtcatcgatggctctgaattgacacttgatcgcagtatgagcgctgggttaactcgctacttcccgacaacagaactggcgcaaattggcgatgaaactgcagacggcatttatcatccaactgaattctccccgctaagccattttgatgcgcgccgcgtcgatttttccctcgcacggttgcgccattataccggtacgccagttgaacattttcagccgttcgtcttgtttaccaactacacacgttatgtggatgaattcgttcgttggggatgcagccagatcctcgatcctgatagtccctacattgccctttcttgtgctggcgggaactggatcaccgccgaaaccgaagcgccagaagaagccatttccgaccttgcatggaaaaaacatcagatgccagcatggcatttaattaccgccgatggtcagggtattactctggtgaatattggcgtgggaccgagtaatgctaaaaccatctgcgatcatctggcagtgctacgcccggatgtctggttgatgattggtcactgtggcggattacgtgaaagtcaggccattggcgattatgtacttgcacacgcttatttacgcgatgaccacgttcttgatgcggttctgccgcccgatattcctattccgagcattgctgaagtgcaacgtgcgctttatgacgccaccaagctggtgagcggcaggcccggtgaggaagtcaaacagcggctacgtactggtactgtggtaaccacagatgacaggaactgggaattacgttacagtgcttctgcacttcgttttaacttaagccgggccgtagcaattgatatggaaagtgcaaccattgccgcgcaaggatatcgtttccgcgtgccatacgggacactactgtgtgttagtgataaaccgttgcatggcgagattaaacttcccggccaggctaaccgtttttatgaaggcgctatttccgaacatctgcaaattggcattcgggcgatcgatttgctgcgcgcagaaggcgaccgactgcatagccgtaaattacgaacctttaatgagccgccgttccgataataagttctgaaccttcttatcagaaatagatgtgaaggagtaagtaagacacctggcaaatagcctgcaataatcgtgggctgtttgcttccttgggcggatacgagttttattatcgtcttaatgatttccacatattaaaagcaagtatgctttcaaaacacaattataaaaaatcccgccaacaatataagtttttataaaattaaatataagattatggctttagaatatttttatttctaatagacgagatttttcctgttatgatataatatgctgaattaacacatgttaacgatttaccagtaatgtaaataaattttcgaggagatcattccagtgggacgtaaatgggccaatattgttgctaaaaaaacggctaaagacggtgcaacgtctaaaatttatgcaaaattcggtgtagaaatctatgctgctgctaaacaaggtgaacccgatccagaattaaacacatctttaaaattcgttattgaacgtgcaaagcaggcacaagttccaaagcacgttattgataaagcaattgataaagccaaaggcggcggagatgaaacgttcgtgcagggacgttatgaaggctttggtcctaatggcagtatgattatcgccgagacattgactagtaatgttaaccgtacgattgctaacgttcgcacaattttcaataaaaaaggcggcaatatcggagcggcaggttctgtcagctatatgtttgacaatacgggtgtgattgtatttaaagggacagaccctgaccatatttttgaaattttacttgaagctgaagttgatgttcgtgatgtgactgaagaagaaggtaacattgttatttatactgaacctactgaccttcataaaggaatcgcggctctaaaagcagctggaatcactgagttcagtacaacagaattagaaatgattgctcaatctgaagttgagctttccccagaagatttagaaatctttgaagggcttgttgatgcccttgaagatgacgacgatgtacaaaaagtttatcataacgtcgcaaatctctaattatcttttaaagaaatctgtctttacggcagatttctttaatctcatataattcttataaaaaatataatattcaactcgtcatattgattatacccccccgttcccagagaaataatatttattaaaattccagttcttctttttctgattacagaaggcaaagtggcaattacgcatagtttcccgataaagacgcgatagcgacatcccgcataaggcatttttctctttatctttgtacggtacttcatggaacagagtttttgaccttgcgaatcgtgatgtctgttggggagggacaatttgctcactgaagcgtgagactcgattaagcgcacgaaacacagaaatcaaaaaacccggtcacttttttacaaggtaaccgggtaaaaataatttttattttttaactgttttgagactcatagagatgtctcaaaactaaaatttggctcctctgactggactcgaaccagtgacatacggattaacagtccgccgttctaccgactgaactacagaggaatcgtgagaacgaggcgaatattagcgatgcccacccacaatgtcaaagcctgttttttaaatttgaaatcgtttgctgaaataatctgcattttgtcgtttattcgctcacaactggctttttttcacacttttgcggctcgggtcgagggtatttccatagccaacgtccagtaaccattcgccagtaaaacagcacggcccgcacagcccagtcggcaaacattcccatccagacaccaaccacaccccagccaagcatgattcccagcacataaccgactacaacccgacaaccccacatgctcaacatgctaacccacatggcgtaacgggcatcacgagcacctttaaatccagcgggtagcacccaactggcggaccaaataggcataaataaagcatttagccaaatcagaatcacaacgacatgtttaacctgtggatcctgggtgtaaaagcttgccataaccccggcaaagggagccgttagccaggcgatggccgttaatccaagagtggaaagccagaacacatgccgcaactgaatctctgcttgcgctatctgccctacccccaaccttcggcctgtaatgatcgtagaagcagagccgagcgcacttccgggtaagttgataagagccgcaatactaaacgcgataaaatttccggcaataacactggtccccatcccggcaacgaacatttgggttaataaccgaccactggtaaataacacactttcgacactcgcgggaataccaatccccatgacttcccagataatgctaaaattcagcggtttaaaatagctctttaagctaatccttagcgcaggattaaaaccaatcgccagcacccacaaaattgcaactgcgccaatataacgagaaatggttaaacccagccctgccccgacaaatcccagtcccggccaggagaaaaggccgtaaatcaatatgccgctaataataatattaagaatattcaggctaccgttaatcaatagcggtattttcgtattccctgcaccacgaagtgccccgctaccaataagagtgatggcagctgctggataactgagtaccgtcagctccagataagtcaacgccagtgctttaacttctgtcgtggcatcacccgcgacgaaatcaataatttgttcgccaaaatgatgaataagcgttgccaacagtacggcaaacaacgtcatgatcaccaaactctgccgcgtcgccaccctcgctcgtcgtcgatcccgcttaccgagactaaatgccacaacgacagtagtaccaagatcgatagcagcaaaaaaagccataatgaccatattgaagctgtccgccaatcccacgccggccatcgcatcttttcccagccagctgaccagaaaagtgctcagaacccccatcaacaggacacaggcattctccatgaagataggaacagcaagcggggttatctcgcgccagaacaacactttgtagctcttgcgtttagcgtgccagcgagtgccgtgaacaacctggcgtaaagcagaggagatattcaaagcgctccttaattgcagaaagtgaaaccacatttcaaataaactgggagaatcagcaaagctgcaaagattttcgccaacaaattgtctgcaaatgcaacaaactgtacttagaaacggcaaacagttggggaatttaaaaatcgggttactcaaaagatttttcgccgttaagatgtgcctcaacaacgattcctctgtagttcagtcggtagaacggcggactgttaatccgtatgtcactggttcgagtccagtcagaggagccaaattcctgaaaagcccgcttttatagcgggatttttgttatatctgataatcaatttcctcttcactgctttccatcacctgccgcttgatatcctcaacactcagtcctgcattacaaagttccagaaagcgccagacatagttacgctgaagttgtcctcgcttcagtcccaaccagacagtattagcatcaaaaagatgccgcgtatccaggcggattaaattctcttcctcttgttcgccactggattgctcggcaactaatccgatcccaagcccaagagcaacataggttttaatgacatcagaatcctgcgcacttaatacaatatctgccagcaaacctttgcgggcaaatgcgtcatcaatacgactgcgccccgtaatcccctgtcggtaagtgattaacggccacttcgctatactttccagcgtcaatggactaatttgcgtcaagggatgatcgtgtggaacaagcaaactatggtgccaacgaaaccacgggaaggcgacgagctgcgggtcattactcaaacgctcgctggcgataccaatatcagcttcgccattttgcaacaatgtcgcaatttcctgtggcgtcccctggattagctcgagccgaacctccgggaaaagttcgcgaaaagctttaatgacctctggcaagctataacgtgcctgagtatgcgtcgttgcaatagtgagaacgccagacgtatcgttggtaaacaggtctgcaagccgacgaacattactggcttcattcagaatacgttctgcaatgaccagtaatgctttgcccggttcagtcatgcccagcagtcgcttacctcgtcgaacaaatatttcgatgccaagttcatcctccagttcccgaatatgacggctgacgccactctgactggtaaaaagcatattcgcaacctctgtcaggttgtaatcctgacgtgcagcctcgcggattatctttagttgttggaaattcacggtaaactccgggcagttcagatttcccgttattgttaaagtctaatgcccggcataacaaataataaaaacccgcatcttattccatcccgatataacacttagctcaccaattgccactgccttttttccatcactggagaactaatcacactcattaacaactctttcactgcctgtgcctgtgggcttaagttcgctctggcgggtaaatttaaactcaaagagagactcatggaaggagtggtaatgcgactcatccacccatttactgcgccacataagctacgcgcggcgctttcgggtaatactgcaacgcccatgccgctggcaatcgctgcggtaagcgtggcaatagactcaatttcaccaataacttttgccgtgagtcgccgtagggaaaaagcctcatcaacacgaagtctaatagcactgtaatcactggggagaaagaggttcatttgcgcaatagcattcacatcaacgctttgccccgggcaatcttgagttcctaccagaaaaagatcttctttcagcaaagcctgactggatacaccagccacaggggaatgctcataaatcaccgccatatcgagttggtgatttatcaatttttcgttaagcactgcaccactattttcatgaagatagataacgatctccggaaattcagcgcgaaccgcctgtaataagggcatggtgatggaactcgcagcggttcctggtgcaaagccaatgctgacttgcccgcttaatgcctgaccaacgttatgcaccgccagttgggcctgttcacactgacgtaaaatggcccgcgcatgggtatagagaatttttccggcgtctgttggtgtaacgccccgctttgtacggatcaaaagttgttgatttaactcaccttccagtgtggcaacctgctggctgagcgctggttgtgcgatatgcaatacttcagcagcctgggtcaggctaccaatatctacaatttttacgaagtatttcaggcgtctgaagttcatgttgcctccggtttttaagaatcggcccaagtgccgccattacttacaaccagattgcaagatgcttgccagttttattttggtgttgatgtacaagctaaccaactgtcaaataagagattatgatagattcgtcatttgctcctttaatcagctgtcgcgttcccctgccctataaaaggagggtatgcaccacgatggttcattacccaataagattgaaagctcaccactttgttgaaattgacagcaaacaaacaaaaaaatgcatttcaccctttgacatcaccatgcactgccattaatatgcgccccgttcacacgattcctctgtagttcagtcggtagaacggcggactgttaatccgtatgtcactggttcgagtccagtcagaggagccaaattcaaaaaagcctgctttctagcaggctttttgctttctaattaccaacgctcttaaaacatctgtctactaccagaactaatttgcacaggcattccgcttcgacgttgcaacgcagcatttgcgcgatttacatcaacttcttgcccgttgataaacgcccgcaaagatggggttaccggcaatggcacttttcggtcagactcatattctgcacgattgcggctcaatggctcatgaacttccagccagttgctgccatctggttcagtggtgtattttactggctggtcgataatttgcacacgcgtcccaacaggaacattatcaaacagatatttgatatcgtcattgcgcagacgaatacagccctgacttacccggagcccaataccaaaattggcattggtaccatggatggcatacaacctgccaatataaatcgcgtacagccccatgggattatcggggcccgcaggaacaaatgcgggcaaactctcccctcgtttcgcatattcgcgccgagtgttcggcgttggcgtccaggttggagcttcttgtttacgttcaacggtagtcacccagttacgcggggtttctcgcccagcctggccgataccaataggaaagacttccacagtattactgtctggtgggtagtaataaagacgcatctcagcgacgttaacaacaatccctttacgaacagtgtcgggcaaaatcagttgctgcggaatggtgagttggctgccagacttcggcaaaaaaacatcagcgcccgggttcgcttccagcatgttacttaacccttgcccgtattgtgcggcaaaagtctccagcggctgggtattgtgatcaggaacagttacagtaaagctctgccccactaaacggctaccctctggaggtaatggataagttaccgccaggctagtatggctggcaaaaagcagagcaaaactgcaaagaatatttacacgacgcatcatgtccctttcctatgtcgcgaaagctatccgttaagtatagcttttatcagacttttcgtttttaactgttcaaatcagaagtcgtattccccggtagaacaatattactggcagcaagttcgcccatgttgttgtatatcgcacaggcagcttcgatgatgggcatcgccagagctgcgccactcccctcacctaaacgcatctccatattgagataaggctccagccccaaatggctgagcgctatacgcgcgcctttttctgcgctcaggtgagaaggaatgagatacggtttgatcgcaggagacatctggcaggctgcgagcgcagcagcataagaaagaaatccatccagcaacacgggtaaaccgcaggaagcagcacctaacatcactccagctattccgaccaaatcaaatccacccacttttgccaggacatcaacaccatcctgaggatttggttgattcaacgtaatcgcccgacgcacaacatcaattttattagccagtttatctgtcggcaggtttgcgccaatcccaaccacttcttcaggatcccggccagtgattgtgctgactattgctgctgccggtgtcgtgtttgccatccccagttcacctacaccaaacagcgtgacaccgttttttgccagctcctgcgtataacatatgacgtccaaaagcaacttttcagcctgacggcgactcattgccggagcactagcaatattgccgctacctcgtgcgacacgcatgttgataagcccggggataggctcagcagtatcaataccaacatcaattacgtggacgttagcgcccgcttgttctgccagcacacacacgccggttgttccacgggtcatattttcagcctgtatggctgtcacttcttttggagaaatagcgaccccttcctcccagacgccgtgatcggcacacataaccagtaccgcttttttgcccacatgcggtatgccattcaaccccggcattcctgccagttgtatggcaagcacctccagctttcccaggctaccaacaggtttgagtaacccgtcaatatgccgttgtgcacggctcatagcggtagaatcgatggctgggatcgtattcagtaaatcggcaagtatttgcatctcacgtctctttatagcagtgccagcaggaagaccagttcaccaagctctatggctgctcccagcgtatcgcccgtttgcccgcccagcgtacgtttgagaagctgaccgaggatgaaaatcgccaccatcgtcaccaccatagcagccacaccatgcatacccggcaataatacggcagcaaaaatagcggctaagccgagtgtgacgcaggtttgtcgcccatcaattttgccaatgaacacattgccaagcccttcttcccgcgcataacgatgacgatacatcaataatgcggcagtcccgcggctgaccgcacatgctgccgccaggcttgcaaggatgctttcgccacgcagagccaactcgcttaacaccagaatctttgccagtaccacaaaaatcaatgccagaccgccgtgggtgcctaaacggctatcacgcatgatttccaacatgcgatcgcggctacgtgcagaaaatacgccatcacaggtatcagcgaggccgtccagatggaatcccccggtcatcagcaccagcacaagtacgctaaacagtgccgccagtggtgcgccacaccatgcctgcagcaccatgaagaccagcccgctaatcgcgccaagcaataatccaatcaaaggaaaagtaataataccgcgagaataatgctcgaaatccagtccctgggaccagcgacgcggtacaggcagacgcgtaataaaactgagcatcgcccaaaataatttactcatttgatttttactccaataccgctaaccaccagccatacttcatttgccgcagcggccaactgctgatttacccgcccggcaatatcacgaaaatgtcgtgccagacgactctccggcacaatccccattcccacttcgttagtcactaatacaacctttgcggggcaacgttggcaggcagcaatcaagctctgaatctcagcattaatcgcctgttccatcgcctgataatcccattcatcagggtctttatcgccgccataatcaaacaacagattagtcaccattgtggtaacgcattcaagcaacacaacctcattcgggttaatgtctgcatgaattaattcatcaagatgttgccagcgctccactgtgcgccagtgctccgggcggccttgccgatgatgttctatccgtgcagccatctcatcatcaaggatttggctggtagcgatatacagaacctgactagagtccccaataagcgcctctgcgtggcgactcttcccgctccgtgcgccccccgtcaccaaaatcatcataccgactcctgattcaaatgtatgatggtattcattgaacagaacaatggatcccccaccgttgctgaccgcaaaacatttacgcgattaatactgcgcgtaatataattaaaaatccagcattctcaatccattacgaaataagatggcattacggaatagccagactttctcgtgttaacgtccgacaaaatgcgtcattgacagcggtttctgtggattgacacatttcattcagataatgaattaatgctactgccggaacaaccagcaaacgggcattgtgttctgaaatccaggctattgattcaacgtcagcgacagatctgcgctgtaaaagaacttgtaaaacaacgtaatagaattatccggaatggtggcgactatgcactagggaaggtgcgaataagtggggaaattcttctcggctgactcagtcatttcatttcttcatgtttgagccgattttttctcccgtaaatgccttgaatcagcctatttagaccgtttcttcgccatttaaggcgttatccccagtttgcagaaactccgtaatgagattaaaagcgctcataactcatctgtcggccagaaggcgcgcctctgaattatccgacggacaaaccgggaacagtgtaatttcccggcaggagcgaaaaaattgaaaggcgcatcttactcttttcgctttcaaaaaaaagagtggtcatcgcgttaacacaccgccctgagatgaattagtgatgttttggctgcaccgcaacatacatttcgatatcccagtacccatcttccgcgccattgttcaaataaacctcgaagcagggctttggtaacatttcataagcactgtcctgcaagagactattaaagaactgataccagggtttagcaaaatcatcaccgactacacgagctaccgccaccgcatactgaccacctgtaatttctgtcagaatgacgccctcactgttttcgggaagcgtaaagtaacccggcaccgtcacgacggtgtcgcagcgtaatttttcggcgggtgtttcatctggattgtcgtaatagacagcaacccactccttcggcacaatatttttgctatctacccacatcatcaactgctcaaagcctttctttaccgtctgttcccacgggccaacgagatggaaacctgcaacggtacgtttctcttcctgcttaatctcgtagttcatgacgcctccattgatactgtttttatatacagtatagttgcaaaattaaaaccacaaggaatgagtgttgattatgcgagcagactcgcactcctgccagtctgctgcaaaagaaaggtcaggccttatggtggaaataatcactcaggcgagaaaacatgctgccttccccgacagattccagggtaaccagcggccagtgcgccacctgtttatcacggtcgtaaagttcaatttcccctacccgctgatgggcgctaattggcgcggtgagttctttaccatcaagggtatatttggctttgatatgtggaatttcggctttcggtagcaccatccagaactcttgttccgttcccaggtcgatattttctttatcgccataccagatgcgttccgttccgacctttttcccacggtgcaaaatttgcaccgtagtaaagttttgttgcccccaacgcagtaattttcttgcctcttcctcacgaccttttgcactgtcagcccccattaccactgcaatgagacgacgctgcccatctacagcgctagcaatgagattaaacccggcaccagaagtatgacccgttttcaggccgtcaacattcatggttttatcccacaacaacccgttacggttttgctgggtgataccgttccaggtgagacttttctcactgtacatatgataaaactcgggctcgccgtggatgatagcacgagaaagcacagctaaatcataagcgctgctatgctggccaggtgcatccagaccatgcactgtttcaaaatgcgtatccttgagatgcagcttctcggcatagttgttcatcatttcaacaaactgccgttgcccaccggcaatatagtcagccagagcaacacaagcgtcatttccggaatccacaattaaaccacggcttaaatcacgtacgcttacgcgatcgccctctttcaaaaacatcagactagaaccgacaaacaccggattatctttcgcccacgcatcgcgccccacggtgacaatatcgtctggcgtaatgcgatgactatcgatagcgcgatccacgacataacccgtcatcagctttgtcaggctggcgggattgcgctgttgatgctcattacccgcggtgaggatctgaccggtggtgtaatccatcaatacccaggacccggcatgaatctctggaggctgaggactaaaaggaatgttttccgccgcaaaaccagagcttaagttaaaaacgaacaaagaagcagcaataataagacggcgtttcaacagcaaaccctcaggagtttcaaatagctgttctttttacggaaatacttatgaactggctggaataaagtgcaagaaaatgtgactaccctctcatttttatctgacatgatctgttgccactcgctgccaaattgtggcgctaaagctgattagcacggtgatatttgatactctggcagacagcagaaataacggatttaacctaatgatgaatgacggtaagcaacaatctacctttttgtttcacgattacgaaacctttggcacgcaccccgcgttagatcgccctgcacagttcgcagccattcgcaccgatagcgaattcaatgtcatcggcgaacccgaagtcttttactgcaagcccgctgatgactatttaccccagccaggagccgtattaattaccggtattaccccgcaggaagcacgggcgaaaggagaaaacgaagccgcgtttgccgcccgtattcacagcctttttaccgtaccgaagacctgtattctgggctacaacaatgtgcgtttcgacgacgaagtcacacgcaacattttttatcgtaatttctacgatccttacgcctggagctggcagcatgataacagccgctgggatttactggatgttatgcgtgcctgttatgccctgcgcccggaaggaataaactggcctgaaaatgatgacggtctaccgagctttcgccttgagcatttaaccaaagcgaatggtattgaacatagcaacgcccacgatgcgatggctgatgtgtacgccactattgcgatggcaaagctggtaaaaacgcgtcagccacgcctgtttgattatctctttacccatcgtaataaacacaaactgatggcgttgattgatgttccgcagatgaaacccctggtgcacgtttccggaatgtttggagcatggcgcggcaataccagctgggtggcaccgctggcgtggcatcctgaaaatcgcaatgccgtaattatggtggatttggcaggagacattagcccattactggaactggatagcgacacattgcgcgagcgtttatataccgcaaaaaccgatcttggcgataacgccgccgttccggttaagctggtgcatatcaataaatgtccggtgctggcccaggcgaatacgctacgcccggaagatgccgaccgactgggaattaatcgtcagcattgcctcgataacctgaaaattctgcgtgaaaatccgcaagtgcgcgaaaaagtggtggcgatattcgcggaagccgaaccgtttacgcctagtgataacgtggatgcacagctttataacggctttttcagtgacgcagatcgtgcagcaatgaaaattgtgctggaaaccgagccgcgtaatttaccggcactggatatcacttttgttgataaacggattgaaaagctgttgttcaattatcgggcacgcaacttcccggggacgctggattatgccgagcagcaacgctggctggagcaccgtcgccaggtcttcacgccagagtttttgcagggttatgctgatgaattgcagatgctggtacaacaatatgccgatgacaaagagaaagtggcgctgttaaaagcactttggcagtacgcggaagagattgtctaatttgaagcctccgccgctggtacggcggaggacaatgttgagtcaggctttttgaacggtgatgctccacgctgcatcgccaatctgctgataatcggtgatggcatgtccttcttctgccgcccactgtgggattgcttcagttgcctgggtgcaatcaaactcaatcactaactcatcgccgctgaccatttctgccagagctgcttttgcttctatgagtggaaacggacagacctgcgtcaccacatccagctttttaatcaccatctttacaccttacttaatttgccgcagcagttgccagtcgcgccttacgctgcggtcgaacatacacaagccaggacgcagtccagactccgagaatcataaatacaaggccaatccagccctgccaggtcatcattgcagtcataaccagtccattaccgatagagcaaccacctgcaatactggcaccgaagcccatcagtacaccacctaacccgctacgtaatgttgtttgtgcatcagctgcgcgaacgcggaactcacggctcgctttggctgcaataaaactccccacgaagatccctaacaccaggaaaacgccccagttaatgtatttcatgtcacccgcgaccagaaattgcagaatattggccgttggggaagtgattcctaacccaaacatgcgtccggttgcttcactcaggggccaggctaaaagcgcaatcaaaccgatgagtacagctgtgacaaagggatgccagcgtttttcaaacagaatatgagcgatcccggttcggcgcggcggtaaggtcgcgactttgagttttggcttcttcaactctttcatcaccacccagagcgttatcaccagcaaaacggcaaccaacggccacacagacaaattaaaagtctcagcaatagagttatgttcagtactgtagtgctgcaaggtttgatttaaaccactggcatgtggagaacgcatcaccgcactcatcaccatataagtgaaaagcgcgatccaactgccgatcaatccctcacccgcgcgataccaggtcccggtggcacatccacccgccagaacaattcccagcccgaagatatacccacctataacagtaccaagccacgggaacgccccggcttcgtaagtcagtaggcccgcctgaattaacgcaaaaacccccacgctttgtacgctaattgcaatcagcaaggcgtaaaacatgcgattatttttcacgatatacatatcgcgaaaaccacctgtcaggcaaaaacgcccacgctgcatgacaaatcccagcagagcaccacaaattagcccgcttaatatcatactaaacataaattaattaaccagatgaatgttaatgaggaaattattcatgactggtggaatgcagaccaataaccaaattctctaaattagaacaaatggttattaatgaggagttcgatacaaaagaataaaaaaaccggagccaaatgttcattcgactccggtttattattagaaaagatgattatgctacgtcttcgtactgcggaaccggattacggaagctcttggtgacgcaagccaggtaaatcagaccgatagcagcccagatcagacccagaaccatactgctttcttccaggttaacccacagcgcaccaacggtcagcgcaccacacatcggcaggaacagatactggaagtgatctttcagcgtcttgttacgcttctcacggatccagaactggctgatgacgctcaggttaacgaaagtgaacgccaccagcgcaccaaagttaatcagcgccgttgccattaccaggtcgaagttgattgccagcagggcaatcgcgccaaccaggatgatgttcatcgccggagtacgccatttcgggtgtacataaccgaagaagcttttcgggaatacgccgtcacgacccattacgtacatcagacgcgctacgcctgcatgcgccgccataccggacgccagtacggtaatggtggagaagatcagcgcgccaacctggaacgctttacccgcaacgtacagcatgatttcaggctgactcgcatccggatctttaaagcgagagatatccgggaagtacagctgcaggaagtaagttgcaaagatgaagatcatgccgccgatcagcgcggtcaggaaaatcgcacgcgggatcacgcgctctgcatctttggtttcttcgctcaggttgctgatgccgtcaaagccggtaaaggagaagcacaggattgtcgccccggtaatcatcgggataacatgcgcatcgccagaccagaatggacgagtgctcgccagcgtaccagcgccttcaccttcaaatacgccataaacaaccatgcccagaatcaccgcgatcagcactacctgcaacacgacgattacagtgttgaagttcgctacggatttcagactacgcaggttaaaggcggtcataaaggccaccagcgccaccacaaacatccagcttgggatggaaggcaccagagcttcaaaatagattttcgccagtagaatgttgatcatcggcgcgaacagatagtcgagcagagaagaccaacccaccataaagccgacagtcgggctaatggatttctgggcgtaagtgtatgcagagccagcagaaggatagcggcgaaccagcttcccgtagctcagagccgtaaacaggatcgcaatcaatgcgaacgcataggctgtcggcacatgaccatccgtgaggccactaacgataccaaaagtatcaaacagcgtcatcggctgcatataggcaagacccatcattacaaccggaactaacgtaagcgttttacgcaattccacgcgagaggtgtttggagtaacgttatggctcatggtcattctcctttacggtgataaccgtcgcgtaagcaaaaaattgccccatttttttggattcctcagcgacaacaactgtcgatttttagtaaatatctatccggtacgaagcccggcctcttggtatgaatgattggtttgaagcaaaaaataaccgacgctgatgaaacgtcggtttttagtcattttttgacagcggcgcattgtgcctaaatgggggggaaatgacaagagaatgagaggcttgtcagaataatttttctttaaatggcactttttccgtcatcagattttgcataaacaccggcgatcgcactatttgctaaaatttcatcccgccaccagccactggcaagtcctgcggtctgttcgttccagccaatccagacgggttcaaagagagtttgggcgaccactttcttctcgattaacgcgccactatcgagaaaacgttgcgccagataacggggtaaatagccgcagccgaggccgctaatttgcagctccagtttggttttaaaatcgaaaacggtaatggcttcttgttcgtcgagaagttgacttgccgtagaagcgcctgcctgcgcagtatcccccaccacaatcgcccgatatcgcttaataatacgacgatttaacggctcttcttccagggctaacggatgatgaggcgcgaccgcaaagacttgttccagatcgcccaaccgactaaaaccaaactcactggaagatggtggctcatgcatcgcgccaacaataatatccgctcgcccctgagtcagggcatcccaactaccaccgagtacgccattgataaacttcaggcgcgtcacgctatgatgttgataaaaagcttcaatgagtggcgcaagcagagaaaaaggaaacgtgtcgtccacgccaatcaccagctcgttttcccagccttcatgcagtttgatcgcctgcttttccagttcccgcacggtatgcagaacttcccgccctttctctaataacatttttccggtgcgggtgaatttagcgcggtgtccgctacgatcaagcaattgaatattaaggtcgctttccagcttgtgaacggtgtaactcagagcggacggcgtcttgtagagtttggcgctcgccgccgcaaaactgccttctttttctaaggcatcgaggatcatcaacacatccagcagtggtttcatacacgcccccttgcagtgcatgcggcgtcctgctggcgtgatcgtttactccagcggcattaccagcggatcgggatactggtattcaaatcccagttcattacaaatccgactgccatcaataatcttacctttgccgctgtccagactatttctgaactgcggaggttccagccccagtaaacgggccatctgcggatagaaaacattacgcgcagggtgagctggcgcacatatattatagatgtgtccgcctttaggtgcctgtaacaacagagtgatagcgccaataacatcttctaaatggactaaattaacaccatgttcaccatcaggcgcggtttttccggcaaagaagcgtccgggatgacgtcccggtccgaccaggcccgcaagacgcagaatatcgacgctagtaccgggtaaattgtgcagccagtcttcgagttcttctaatactcgtccactgttggttactggattacgcggggtggtttctttcaccgtgccttgcgcgtcgccatagacagatgtactgctggtaaaaataatgcggggaatacgatgggccagcgcgctatccactaactcttgtaccgcttgtaaatagaactcatcgccggggccgctacgacgtgccggaagcgtaatgaccagcgcatcggcatccatcagggcatccagatcgtcagaatcgcaaactagctcaggctccatgcgaagcagatagctatcaatgccactcattcgggccgcttcgacaccatcttgtgtggttttactcccggtgacttgccagcctcgcgcactaagactcatcgccagcggcatgcctaaccaccctaacccgacaattgcgacctttttcatccgttatctcctgatacaccttagatctataaggctacgctagcgtatcaaaactgacaattcattctatgaatgaatctgttcaataatgataacgacatgctgcaatgagcagactatcgtcggtaaccgcgtataccagacggtgctcctctgtaatgcgtcgggaccagaaaccactcaaattatgtttcaggggttctggcttccccttaccttcaaatggcgttctgcgggtatctttgataagttcattgatctttttaacaattcgcttatctgtttcctgccagtacagataatcgtcccaactttcctcagaccagattagtttcactcaatgatgtccttttccgttcctttgccacttttcaggctatcgatactgtccatcaatctccgggcgttagcgggggagcgcagtagataagccgtctcttccaggctgttgtattcttcgagactcatcagaacacaagcctctccattctgacgagtaataaggatcggggcatgatcttcaacggctttcatcattgttgcgctcaaattctgacgcgcttcgctgtagctaattgtacgcatgtcaatctcctcttttgtacagttcattgtacaatgatgagcgttaattaactatttattaattagtttgtagatcaaggtattgtcagtgagacgaaaatccaggcttcgctatttttggtgccatcagctaagaggacagtcctcttagccccctcctttccccgctcattcattaaacaaatccattgccataaaatatataaaaaagcccttgctttctaacgtgaaagtggtttaggttaaaagacatcagttgaataaacattcacagagacttttatgacacgcgttcaatttaaacaccaccatcatcaccatcatcctgactaatctttcaggcgatgtgtgctggaagacattcagatcttccagtggtgcatgaacgcatgagaaagcccccggaagatcaccttccgggggcttttttattgcgcggttgataacggttcagacaggtttaaagaggaataacaaaatgacagacaacactcgtttacgcatagctatgcagaaatccggccgtttaagtgatgacagtcgcgaattgctggcgcgctgtggcattaaaattaatcttcacacccagcgcctgatcgcgatggcagaaaacatgccgattgatattctgcgcgtgcgtgacgacgacattcccggtctggtaatggatggcgtggtagaccttgggattatcggcgaaaacgtgctggaagaagagctgcttaaccgccgcgcccagggtgaagatccacgctactttaccctgcgtcgtctggatttcggcggctgtcgtcttagcctggcaacgccggttgatgaagcctgggacggtccgctctccttaaacggtaaacgtatcgccacctcttatcctcacctgctcaagcgttatctcgaccagaaaggcatctcttttaaatcctgcttactgaacggttctgttgaagtcgccccgcgtgccggactggcggatgcgatttgcgatctggtttccaccggtgccacgctggaagctaacggcctgcgcgaagtcgaagttatctatcgcagcaaagcctgcctgattcaacgcgatggcgaaatggaagaatccaaacagcaactgatcgacaaactgctgacccgtattcagggtgtgatccaggcgcgcgaaagtaaatacatcatgatgcacgcaccgaccgaacgtctggatgaagtcatcgccctgctgccaggtgccgaacgcccaactattctgccgctggcgggtgaccaacagcgcgtagcgatgcacatggtcagcagcgaaaccctgttctgggaaaccatggaaaaactgaaagcgctgggtgccagtagtattctggtcctgccgattgagaagatgatggagtgatcgccatgagctttaacacaatcattgactggaatagctgtactgcggagcaacaacgccagctgttaatgcgcccggcgatttccgcctctgaaagcattacccgcactgttaacgatattctcgataacgtgaaagcacgcggcgatgaggccctgcgggaatacagcgcgaagtttgataaaaccacggttaccgcgctgaaggtgtctgcagaggagatcgccgccgccagcgaacgcctgagcgacgagctaaaacaggcgatggcggtggcagtaaagaatattgaaaccttccacactgcgcaaaaactgccgccggtagatgtagaaacgcagccaggcgtgcgttgccagcaggtcacgcgtccggtagctagtgttgggttgtatattcctggcggctccgccccgctcttcagtacggtattaatgctggcgactccggcgagtattgcgggctgtaaaaaagtggtgctgtgcagtccgccgccgattgccgatgagatcctttatgcggcgcagctgtgcggtgtgcaggacgtgtttaacgtcggcggcgcacaggccattgccgcactggcgtttggtacggaatctgtgccaaaagtggacaaaatcttcgggccgggtaacgcctttgtcaccgaagcgaaacgtcaggtgagccagcgtctggacggtgcggcgatcgatatgcccgcaggcccgagcgaagtgctggtgattgctgacagcggcgctacgccggatttcgtggcttctgatttgctctctcaggctgaacacggcccggacagtcaggtgattttactgacgcccgctgctgatatggcgcgtcgcgttgccgaggccgtcgaacgccaactggcagaactgccgcgtgccgaaaccgcccgccaggcactgaacgccagccgcctgatcgtgactaaagatttagcgcagtgcgtggagatctccaaccagtacggcccggagcacctgatcattcagacccgcaacgcccgtgaactggtcgatagcatcaccagcgccggtagcgtatttcttggtgactggagtccggaaagcgcaggtgattacgcctccggcaccaaccacgttctaccgacttacggttacaccgccacctgttccagcctcgggctggcagatttccagaagcgcatgaccgtacaggaactgagcaaagaggggttctccgcgctggctagtaccatagaaacactggccgccgccgagcgcctgaccgcccacaaaaatgccgttactttgcgtgttaacgcccttaaggagcaagcatgagcaccgtgactattaccgatttagcgcgtgaaaacgtccgcaacctgacgccgtatcagagcgcgcgtcgtctgggcggtaacggcgatgtctggctgaacgccaacgaataccccactgccgtggagtttcagcttactcagcaaacgctcaaccgctacccggaatgccagccgaaagcggtgattgaaaattacgcgcaatatgcaggcgtaaaaccggagcaggtgctggtcagccgtggcgcggacgaaggtattgaactgctgattcgcgctttttgcgaaccgggtaaagacgccatcctctactgcccgccaacgtacggcatgtacagcgtcagcgccgaaacgattggcgtcgagtgccgcacagtgccgacgctggacaactggcaactggacttacagggcatttccgacaagctggacggcgtaaaagtggtttatgtttgcagccccaataacccgaccgggcaactgatcaatccgcaggattttcgcaccctgctggagttaacccgcggtaaggcgattgtggttgccgatgaagcctatatcgagttttgcccgcaggcaagcctggctggctggctggcggaatatccgcacctggctattttacgcacactgagcaaagcttttgctctggcggggcttcgttgcggatttacgctggcaaacgaagaagtcatcaacctgctgatgaaagtgatcgccccctacccgctcagcacgccggttgccgacattgcggcccaggcgttaagcccacagggaatcgtcgccatgcgcgaacgggtagcgcaaattattgcagaacgcgaatacctgattgccgcactgaaagagatcccctgcgtagagcaggttttcgactctgaaaccaactacattctggcgcgctttaaagcctccagtgcggtgtttaaatctttgtgggatcagggcattatcttacgtgatcagaataaacaaccctctttaagcggctgcctgcgaattaccgtcggaacccgtgaagaaagccagcgcgtcattgacgccttacgtgcggagcaagtttgatgagtcagaagtatctttttatcgatcgcgatggaaccctgattagcgaaccgccgagtgattttcaggtggaccgttttgataaactcgcctttgaaccgggcgtgatcccggaactgctgaagctgcaaaaagcgggctacaagctggtgatgatcactaatcaggatggtcttggaacacaaagtttcccacaggcggatttcgatggcccgcacaacctgatgatgcagatcttcaccagccaaggcgtacagtttgatgaagtgctgatttgtccgcacctgcccgccgatgagtgcgactgccgtaagccgaaagtaaaactggtggaacgttatctggctgagcaagcgatggatcgcgctaacagttatgtgattggcgatcgcgcgaccgacattcaactggcggaaaacatgggcattactggtttacgctacgaccgcgaaaccctgaactggccaatgattggcgagcaactcaccagacgtgaccgttacgctcacgtagtgcgtaataccaaagagacgcagattgacgttcaggtgtggctggatcgtgaaggtggcagcaagattaacaccggcgttggcttctttgatcatatgctggatcagatcgctacccacggcggtttccgcatggaaatcaacgtcaaaggcgacctctatatcgacgatcaccacaccgtcgaagataccggcctggcgctgggcgaagcgctaaaaatcgccctcggagacaaacgcggtatttgccgctttggttttgtgctaccgatggacgaatgccttgcccgctgcgcgctggatatctctggtcgcccgcacctggaatataaagccgagtttacctaccagcgcgtgggcgatctcagcaccgaaatgatcgagcacttcttccgtagcctcagttacaccatgggcgtgacgctacacctgaaaaccaaaggtaaaaacgatcatcaccgtgtagagagtctgttcaaagcctttggtcgcaccctgcgccaggccatccgcgtggaaggcgataccctgcccagcagcaaaggagtgctgtaatgaacgtggtgatccttgataccggctgcgccaacctgaacagcgtgaagtctgccattgcgcgtcacggttatgaacccaaagtcagccgtgacccggacgtcgtgttgctggccgataaactgtttttacccggcgttggcactgcgcaagcggcgatggatcaggtacgtgagcgcgagctgtttgatctcatcaaagcctgtacccaaccggtgctgggcatctgcttagggatgcaactgctggggcggcgcagcgaagagagcaacggcgtcgacttgctgggcatcatcgacgaagacgtgccgaaaatgaccgactttggtctgccactgccacatatgggctggaaccgcgtttacccgcaggcaggcaaccgcctgtttcaggggattgaagacggcgcgtacttttactttgttcacagctacgcaatgccggtcaatccgtggaccatcgcccagtgtaattacggcgaaccgttcaccgcggcggtacaaaaagataacttctacggcgtgcagttccacccggagcgttctggtgccgctggtgctaagttgctgaaaaacttcctggagatgtgatgattattccggcattagatttaatcgacggcactgtggtgcgtctccatcagggcgattacggcaaacagcgcgattacggtaacgacccgctgccgcgattgcaggattacgccgcgcagggtgccgaagtgctgcacctggtggatctgaccggggcaaaagatccggctaaacgtcaaatcccgctgattaaaaccctggtcgcgggcgttaacgttccggtgcaggttggcggcggcgtgcgtagcgaagaagatgtggcggcgttactggaagcgggcgttgcgcgcgtagtggtcggctccaccgcggtgaaaagtcaagatatggtgaaaggctggtttgaacgcttcggtgccgatgccttagtgctggcgctggatgtccgtattgacgagcaaggcaacaagcaggtggcagtcagcggctggcaagagaacagcggcgttagtctggaacaactggtggaaacctatctgcccgtcggcctgaaacatgtgctgtgtaccgatatcagccgcgacggcacgctggcaggctctaacgtctctttatatgaagaagtgtgcgccagatatccgcaggtggcatttcagtcctccggcggtattggcgacattgatgatgtggcggccctgcgtggcactggtgtgcgcggcgtaatagttggtcgggcattactggaaggtaaattcaccgtgaaggaggccatcgcatgctggcaaaacgcataatcccatgtctcgacgttcgtgatggtcaggtggtgaaaggcgtacagtttcgcaaccatgaaatcattggcgatatcgtgccgctggcaaaacgctacgctgaagaaggcgctgacgaactggtgttctacgatatcaccgcttccagcgatggccgtgtggtagataaaagctgggtatctcgcgtggcggaagtgatcgacattccgttttgtgtggcgggtgggattaagtctctggaagatgccgcgaaaattctttcctttggcgcggataaaatttccatcaactctcctgcgctggcagacccaacattaattactcgcctggccgatcgctttggcgtgcagtgtattgtggtcggtattgatacctggtacgacgccgaaaccggtaaatatcatgtgaatcaatataccggcgatgaaagccgcacccgcgtcactcaatgggaaacgctcgactgggtacaggaagtgcaaaaacgcggtgccggagaaatcgtcctcaatatgatgaatcaggacggcgtgcgtaacggttacgacctcgaacaactgaaaaaagtgcgtgaagtttgccacgtcccgctgattgcctccggtggcgcgggcaccatggaacacttcctcgaagccttccgcgatgccgacgttgacggcgcgctggcagcttccgtattccacaaacaaataatcaatattggtgaattaaaagcgtacctggcaacacagggcgtggagatcaggatatgttaacagaacaacaacgtcgcgaactggactgggaaaaaaccgacggacttatgccggtgattgtgcaacacgcggtatccggcgaagtgctaatgctgggctatatgaacccggaagccttagacaaaaccctcgaaagcggcaaagtcaccttcttcagccgcactaaacagcgactgtggaccaaaggcgaaacgagcggcaatttcctcaacgtagtgagtattgccccggactgcgacaacgacacgttactggtgctggcgaatcccatcggcccgacctgccacaaaggcaccagcagttgcttcggcgacaccgctcaccagtggctgttcctgtatcaactggaacaactgctcgccgagcgcaaatctgccgatccggaaacctcctacaccgccaaactgtatgccagcggcaccaaacgcattgcgcagaaagtgggtgaagaaggcgtggaaaccgcgctggcagcaacggtacatgaccgctttgagctgaccaacgaggcgtctgatttgatgtatcacctgctggtgttgttgcaggatcaggggctggatttaacgacggtaattgagaacctgcgtaaacggcatcagtgagttgcggggtaagcggatgcgatattgttgccgcatccggcaaaaaaacgggcaaggtgtcaccaccctgccctttttctttaaaaccgaaaagattacttcgcgttgtaattgcgtagagcattacgccccagcacaatccccgcgccaaccatgccacccagcagcaccgccagaatcaaggtaattgcctttttcgggctatcacgacgaataggtaacatcggtttcatcacataacggtaagcatgaatatcaagatcatcaacttttaagctttcgatatccagcaggttttgacgagtctgatagtagtttgggctgaacaccaacggacgggtcgcctcatgcttaatcatgctctccagcgcttcgctccccaaaaggaacaacgtatcttgtgtgatatcttcgccagtctgttgaatctgcggttttgtcacctgcgcctgattcgcatactgcaacgcttcctgaatctgacggatacgcagatctttctgctcctgcgcgactacttcctgcgttcttaaagagtcctgcaagtttttccgtcccagagcaatgttgtctttgagatccttttctagctcttgattcactttatcgtcaacttgctgaatgtattgggccaacttcatttgtgcgccctctgcagtttgcccaacataagaaacagtcaatggtaattgctggttcttaacagaaggttcgatggtaagtttttctcgttcttcctgattatccagcgtttctgctaatgcagagaaggcagaactgaagcgaccaattaacgtctcctgcaaatcgcttactttcggtgcagcctgaccatagataacattcatggcattgttatagccagcaatttgccccacgtcgggctgagtgataattgctgtactcgtccatttctccttcgctactgccaaatatccaatagccagggcaatagccacaatgacggaaatgatgattgtcatcttgccacgccacaactgcactagtaaatcaatcaaatcaatctgttccgggtcatggttttgcccagaaacattattattttctactctcatcattaccctaactgacggaaatttccaagtccgcatagtttagcgataatcctcgtgaatgctataggataagtgataaaaataatgaattgttgtgtaagtaacaaaagacaatcagggcgtaaatagccctgataacaagatgttagtcgctgccaaagagatcgcgggtgtataccttatctgccacatccttaagctcttctgccattcggttagagataatgacgtcggcttgttgtttgaaggtggcgagatcacgttccaggcgagagttgaagaaactgtcttctttcatcactggctcgtagatgatcacttcaacacctttcgccttgatacgtttcataatcccctgaatagaagacgcacggaagttatcactaccgctcttcataatcagacgataaatacccaccacttgcggcttgcgactcaaaatggcatcggcaataaaatctttacgcgtgcggttagcatcgacaattgcgctgatcaggttattcggcacagactggtagttcgccagtaactgcttggtatctttcggcagacaataaccaccataaccaaagctcggattgttgtaatggttgccaatacgtgggtcgagacaaacgccttcgattatttgacgggaattcagacctaaactttctgcatagctatccagttcgttaaagtacgccacgcgcatcgccaggtaggtgtttgcaaaaagtttaatcgcttctgcttcagtggagtcggtaaacagcatcgggatattttgcttaatcgcgccttcctgtaacagagcagcgaaacgttctgcgcgttcactacgctcaccgatgacaatacgactaggatggagattatcgtaaagggctttaccctcacggagaaattccggggagaatataatattttcagtgcgatatttcttatgcatcgctgcggtaaaaccaacgggaaccgtacttttgatgaccataaccgcataaggatttatctcaactacgtctttaattacactttctacactggatgtattgaaataattagttttaggatcatagtcggttggagtggcgatgatgacataatcagcatcccggtaggcttcatttttatctaatgtggcattaaagtgtattttatcactttgcaaaaactgctgaatttccttatcaacaataggagatatccgatcattcagcatagcaacgcgactcggtaaaatatctaatgccacaacctcatgattttgtgcgattagaagcccgttactcaagcctacatagccagtaccggaaatggtgattttcatttcatgctctcagaattaacttaactgtgaatcatgatgtttttagcatcctgataagagctaaaagttttaacgctacgttgttcgatggtcaacgcaacgaaaaacaattcagattttctttataagaatagctgatatttattaagttaatattaagcagtgaaatttagtctataagatatttggcaaaaaaaagcccggtgcaatatacgccgggcctcaattttattgttggttaaatcagattaatccagccattcggtatggaacacaccttctttatcaatacgcttataagtatgcgcaccaaaatagtcacgctgtgcctggatcaggttcgcaggcagaacagcagcacggtagctgtcgtaataggcaaccgctgcggagaaggtcggaaccggaataccgttctgtactgcataagcaacgacatcacgcagcgcctgctggtagtcatcggcaatttgcttgaagtacggagccagcaacaggttagcgatctgtggattttcggcataagcatcggtgattttctgcaggaactgcgcacggatgatgcagccagcacggaaaatcttcgcgatttcgccgtagttcagatcccagttgtactcttcagacgcagcacgcagctgagagaagccctgggcgtaagaaacgattttgcccagatacagcgcacgacgaactttttcgatgaactcagccttgtcgcctgctggctgtgcttgcggaccagagagaactttagatgcggcaacacgctgatctttcagagaagagatataacgtgcaaacacagactcggtaatcaggctcagcggttcgccgagatccagcgcgctctggctggtccatttaccggtacctttgttagccgcttcatccaggatcacatcaaccaggtagttaccgtcttcatcttttttggtgaagatatctttggtgatgtcgatcaggtaactgctcagttcaccgttattccactcggtaaaggtctgcgccagttcttcgttggtgaggttcaggccacctttaagcagagaataggcttcagcaatcagctgcatatcgccgtattcaataccgttgtgaaccatcttcacatagtgacctgcgccatcggcaccaatataggtaacgcatggttcaccgtcttcagctacggcggcgattttggtcaggatcggtgctaccaattcataggcttctttctggccaccaggcataatagaaggacctttcagcgccccctcttcaccgccagaaacaccggtaccgatgaagttaaagccctctgcactaagctcacgattacgacgaatagtgtcctggaagaaggtgttaccaccatcaatgatgatgtctcctttatcgagatatggtttgagggaatcaatagcagcatccgtgcctgcacctgctttcaccattaacaggatgcgacgaggcgtttccagagattcgacaaactctttcaccgtatagtaaggaaccagtttcttgcctggattttcggcaatcacttcttccgtcttctcacgggaacggttgaaaatagagacggtataaccacggctttcgatgttgagcgcaaggttgcgtcccatcactgccataccgactacgccgatctgttgcttggacattacatactcctgtcaggtgtgatcaccgcgctgaatgctcgcggcctggaatgttcgcaaataagtatacaaagtacttattaaagtataaatagcttatccatgcttatatgcttacggctttatatgtctccacatgcgatatttcttaaataatgttttattattaccacttttaattcagggataatgtgaggttattaccctcaaataatatgagataaatagtgctgcaacattgcatttttgccccgatttatccatgatcgaattgtgacatttgtcatacaacgaataggttttgtacttactatggaatggattgccgatccgtctatctgggccgggttaatcacgctgattgtgatcgaactggtcctcggcattgataacctggtctttattgccatcctcgccgaaaaactaccgccgaagcagcgtgaccgcgcacgggttaccgggctgctgctggcaatgttaatgcgcctgttactgctggcgagtatctcctggctggtcaccctgactcaaccgctgttcagcttccgcagctttacctttagcgcccgcgacttaatcatgctgtttggtggtttcttcctgttgttcaaagccacgatggagctgaacgaacggctggaagggaaagacagcaataatcccacacaacgcaaaggtgcgaagttctggggcgtggtgacgcaaattgtggtactggacgccattttcagtctcgacagtgtgattaccgccgtcgggatggtcgaccatttactggtcatgatggccgccgtggttatcgctatcagcctgatgttgatggccagcaagccgttaacgcaatttgttaacagtcacccgacgatcgttattctctgcttaagcttcctgttgatgattggctttagcctggtggcagaaggtttcggcttcgtcattccgaaaggctacctgtacgctgccattggtttcagcgtgatgatcgaggcgctcaatcagttggctatctttaaccggcgacgttttctttccgctaaccagacgctgcgccagcggactaccgaagcggtaatgcgcctgcttagcgggcaaaaagaagatgcggaactggacgccgaaaccgcgtccatgctggtggatcatggtaaccagcagatctttaatccgcaggaacggcggatgattgagcgggtacttaatcttaaccagcgtaccgtcagcagcattatgacgagccgccacgatattgagcatatcgatctcaacgcgccggaagaagaaatccgccagttgctggagcgaaatcagcatacgcggctggtggttaccgacggtgatgacgcagaagatttgctcggtgttgttcacgttatcgacctgctacaacagtctctgcgcggcgaaccgctcaacctgcgggtgttgattcgccagccgctggtgttcccggaaaccttgccgttgttacctgccctggagcagttccgtaatgcccgcacgcactttgcttttgtggtggatgagtttggcagcgtggaagggattgtgacattaagtgacgtcactgaaaccattgccggtaacttaccgaacgaagtggaagagatcgacgcccgccatgatattcagaagaatgcggacggttcctggacggcgaatggtcatatgccgctggaggatctggtgcaatatgtgccgctgccgctggatgaaaaacgtgaatatcacaccattgccgggctgttgatggagtatttgcagcgtattccaaaacctggcgaagaagttcaggtgggggattatttgcttaaaacgttgcaggtagaaagccatcgcgtgcagaaggtgcagattataccgctgcgtaaggatggcgagatggagtacgaggtgtgatggtatcggtcattttacccaatagccgaaaggaataagatgagggaaccgcgccatcggcgatttaccgccgggagcccgggttgccagggtggtggagattgagccaccctggcacgttcaccggcttgagcgttccatagtagcgaggaacatcaagtgaacggaacagccttcgatcttacatattcagaatataatgatgccgccacgaacgcctgatgcgacgctttacgcgtcttatcaggcctacaggactggtcacctggtaacttacatcttctccagcaacttcttcacatctttgccattacgggaatctttattccgctcggcccagtcattcaggcgacgtttcgcttcgtcctgtagatgtttgcgcagtaactgatccacttgcaggctgtaattgagttgctgccagttgccataaacccgcagcggtactggcgtttctttcaggaaatcaatcagtttgctttccccgttccagccacccacgacccgaatatcaaactgggtgtcgcaggtttgatctgccagattcaacatgccttcccctgtcagcgccagcacagggctttgaccttgcatgtcgtttaacgtcacgacgccatccttcaacgtcaaatcggtggtaaagcggtcaagccgcgtcacgttatcaaagttttcagcggccttcacatcaccgccattacgctctaccgcttgctgaatcatctgctggaagttcatcccttccatgcgcgtgtcggtcatttcgacatgtgcctgtccttgccagttgtggcggaatgcgtcggcatctatgtcagcaccggagaaatcaccagccagactcatttttccggtcaagctaatcggatagttaaacgccttcagaatggtaccaatctcaacgttttccagccgtggctggaagtttatccgcggatttatacttgtcgcgtccagcgtgcccggcagactaacctgtccaccgttaagtttgccctgcagttgagtaatttccagcaaaccgctcttgttggtcatttgcgtggcaacatctgtaaaattcattccgcgccagcgcacgttactggcctgcaacaaaatatcagccgtaaagccttgcagtccctgataggccggttcatcaatacggctagaaatgaccgggcgcggcaacgtactttggctctgcccctgctgcgcggcaccgttttcaccattcgcggtttcattaagcgggatgaggttgtcaagattcagttgcgggaattgcagcctcagctgccattccggtttctctgtcagcgtaacctgtgcttgcccgcttagcgtactatcattggcggtcaaactaatttggttaaaactaaggcgtttatgactctcctgccactgggcctggaaactcccctgcccctgaataccttgttttggtaaatcggcaccctgcaactgccagttaatttgttcaatagccgccgttaaatcatgcggataatcagaagcatctaccgtaccgttaagggatatcgtgagatcgcgctgatcgcgattaacccgcccggagaactcaaaactaccacgatgttggggatcttgttccatttgcaggcgaatattgcggattgtcacctgctcgtcatcttcatgctggaacaccagcacgctgtccgccaccttaagactggatatatcaaagctccatccgcgatcgtcactcagatccggcaaggtattgtcgcgcggtgcaaccggagcgtcttcactgcgcaccgcttccgtctgcggcgtcagttggatcactgccccttttagcatcacctgcttaacgctcagttgatgactcagtagtggtaaaagcgccacgtccagacgcatgttgtcggcgcgaaccagtggctggcttgcgccctgggcggtgagagacattcgcccggagaggatactaagctgcggccagacgtgccaacgcagtggcccgtcgagctgcaattgataaccgctacgtgcagcaacttgcttgaccatatagtcgcggaaatcattcggattcaccagcaacactaacgcagataacccggccaccagcacgaccaggagtatcatcagcgtcgtcagaaatcgtctcatggtatcctcaatgggcctgaattagtctttatcgattcggctggctaccgcgccctgctggttgcgatatttcgcatcttcacggcggttgtaaggtcgcaccgccgggccggaaagcggctcaaagctcagcgcaccaattaacatgcccggacgcagcgccagcggcagcttaccggagttgtagaactccagcacaatgcaaccagaccagcccggatcgatgcggtgcgcggtgacgtgcaccatcagccccagacgcgccagactggaacgcccgtccagccagcccaccagatcggctggcagcgtcacgctctccagcgtcaccgccagcgccagctctcctgggtgaagatagaacgcctcgccctcgtcgagaacgatctcatcgctcatcacgcggtcaagcgcggcgctcacttcatctttgggaccgctcagatcgataaacgctgccgtgtgaccacggaaggtacgaaatttattgcccaggcgtacatccaccgtcgcgccgttaatacgctccactggcggacgtgggttgatgctcaaacggccttcatcaagccaggcttcaatatctcggtcacacagacgcatggcattttctcctttcgcgcatcactcccttaacgccaattacgtcaagggcatactaggttatcactgaacggtacacaatttatcaagcttattcaaagaactgacttattttcgctttcaatatatcgatcgcgatgcggtttttcccgccgcgcggcacgataatgtccgcatattgtttagaaggctcaatgaattgcaggaacatcgggcgcacggttttttgatattgcgccatcacactatccatactacgcccacgctcgttaacgtcacgcttgatgcggcgcatcaggcagatatccagcggggtatcaacgaaaatggagaagttaagttcgtcacgcaaacgcgcatccgtcagcaacaaaatgccttcgagaatgatgaccttcttcggctcaaccgtcaccgtttctttcatacgcgtatgttcaacatagctgtaaaccggcaggtcaattgcgctgccgcgtttcaacgcttgtaaatgctcaagcagcagactgtgatccatcgcgctgggatggtcgtagttggtcttaacgcgttcttccatgctcagatggctttgatctttgtaatagcagtcttcgggaattacgccgatgtgttcatcaccgacttgctcacgcaattcacgataaagggtactggcaataagactcttgccggaagcgcttgcgccagcgataccgataatgacgcactgatgagactgatcagtcatatatttagcgacctgattaacctggatgttaggaagggggcgacgaagcgccaaacgcggcaattatagggatttcatccgtctgataccagtcgaatagcgttgccgcgcgctcagagttaattgttgacaaagaattcccgggggcaaattacgttgatcagttttatgtaaggtaaaaaatgttaaacgcagttgcgcaaattatccgcctttacgtcactttatgagcaattcgcatataaaatgtaaaacttttgtactagcataaacacagaaacgaatactggcgaccaggtcttgcggataaagcggtaatgagcaaacaaagtcagcatgtattaattgccctgccccacccgctgcttcacctggtcagtttaggtttagtcagctttatctttacccttttcagccttgagcttagccagtttggcacccaactcgccccactgtggttcccgacgtccatcatgatggtggcgttttatcgccatgccgggcgcatgtggccgggaattgcgctgagctgtagcctgggaaatatcgccgcatccatcctgcttttttccaccagcagcctgaacatgacctggacgaccatcaatattgttgaagccgtggtcggggcagtgctgctacgtaaattgctgccgtggtataaccccttgcaaaatctggctgactggctgcgtctggcactcggcagcgccattgttccgcctctgttggggggtgttctggttgtcctgctgacgcccggagacgatcctctcagggcatttttgatatgggtactgagtgaatccatcggcgctctggcactggtgccgctgggattgttatttaaaccacactatctgctgcgccatcgcaacccacggttgctttttgagagcctgctcacgttagccatcacactgacgttaagctggcttagcatgctgtatctgccgtggccttttactttcattattgtgctgttgatgtggagcgccgtgcgtctgccacgaatggaagcctttttgatcttccttaccacggtgatgatggtgagcctgatgatggccgcggatccccccctgcttgctacgccgcgtacgtacctgatgagccatatgccgtggctaccgtttttgctgatcctgctgcccgccaacatcatgaccatggtgatgtatgcctttcgtgcggaacgcaaacacatttccgaaagcgaaacccactttcggaacgcgatggaatattccgctatcggtatggcgttagtgggcaccgagggacaatggctgcaaaccaacaaagcgctctgccagtttctcgggtacagtcaggaagagctgcgcggactcacctttcagcaactgacctggccggaggatctcaataaagatctccaacaggttgaaaagctgataagcggtgaaataaacacctatagtatggaaaaacgctactacaaccgcaatggcgatgttgtctgggcgttgcttgccgtcagtctggtgcgccacacggatggcacgccgctctattttatcgctcagattgaagacattaacgagctaaaacgcaccgaacaggtcaatcagcaactgatggagcgcatcactctggctaacgaagcgggcgggattggcatctgggagtgggagttgaagccgaatatttttagctgggataagcggatgttcgagctgtatgaaattcctccacatatcaaaccgaactggcaggtgtggtacgagtgcgtgctgccggaagatcgccagcatgccgaaaaagtgattcgtgatagcttgcaaagtcgcagcccctttaaactggaatttcgcattaccgtaaaagacggtattcgccatatccgcgccctcgccaaccgggtactgaataaagaaggcgaagtcgaacgtctcctcggcatcaatatggatatgaccgaagtgaaacagcttaacgaggcattgtttcaggaaaaagagcgcctgcacattacgcttgattccatcggtgaagccgtggtctgtattgatatggcgatgaaaattacctttatgaatccagtggcggagaagatgagcggctggacgcaggaagaagcgttaggtgttccgctcctgacggtgttgcatattacttttggcgacaacggaccattaatggagaacatttacagtgccgacaccagtcgttccgcgatcgagcaagatgtggtgttgcactgtcggagcggcggcagttacgacgtgcattacagtattacgccgttaagtactctggacggcagcaatattggtagcgttctggtgattcaggacgttaccgaaagtcgcaaaatgctgcgccagctgagctacagcgcctcccatgatgcactgacgcatctcgccaaccgcgccagttttgagaaacaactgcgtatcctgctgcaaacggtaaacagtacacatcagcgacatgccctggtgtttatcgatcttgatcgctttaaagcggtgaatgacagcgccgggcatgcggcgggtgacgctttgctgcgcgaactggcgagcttaatgctgagtatgctgcgttccagcgacgtgctggcgcgactcggtggggatgaatttggtctgctgctaccagactgtaatgttgaaagcgcgcgttttatcgctacacgcattatcagtgccgtgaatgactatcactttatatgggaaggccgtgtgcatcgggtaggtgccagtgccgggattaccttgattgatgacaacaatcatcaggcggcagaagtgatgagccaggctgatatcgcctgttatgcctccaaaaatggtggccggggccgggtgacggtttacgaaccgcagcaagctgccgcacatagcgaacgggcggcgatgagccttgatgaacagtggcggatgattaaagagaatcagttgatgatgctcgcccacggtgtcgctagcccacggatcccggaagcgcgtaatttgtggctgattagtcttaagctctggagttgcgaaggcgagattattgatgaacaaacatttcgtcgtagcttcagcgatccggcgcttagccatgctcttgaccgccgggtattccacgaatttttccagcaggccgcaaaagcggttgccagtaaaggcataagcatctccctccccctttccgttgccggtttgagtagcgccacgctggtgaatgatctgcttgagcagctggaaaatagccctctaccaccacggttattacatctgattattccggctgaagcgattttagatcacgcagaaagcgtgcaaaaactgcggctggcgggatgtcggatagtgctcagccaggtgggccgcgatctgcaaatcttcaacagcctgaaagcgaatatggcagattacctgctacttgatggtgagttatgcgccaacgtgcagggtaatttgatggatgagatgctgattacgattattcaggggcacgctcagcgactcgggatgaaaaccatcgccgggccagtcgttttacccttagtgatggatacgctttctggcatcggcgtcgatctgatttatggtgaggtgattgccgatgcccaaccgctggatttgctggtgaatagtagttatttcgcgattaactgaggcgtgcttccccatcgcctgatgcgacgctaacgcgtcttatcatgcctacaaatcgctcattccccaggccggataaggcgctcgcaccgcatccggcgaccaacgtcatgcttcgtctggttgccagccttccgtataccagatatgcaacagcgcataagaacgccagggcttccagcgctcggcataacggcggatttgcgccggtgtcattcccggaaatcgctgtttaatcagataatcatccggcaggaaaacatctttcgcctgccagccacgcaaagcaaaataattcgccgtccagcgcccgatacccggaaaagtttgcagcgttttcatcgcctgctccacatcgcccggtattgtcattggtaaggtgccctccagcgccgcatttgccagatgaatcagcgcctctgcccgtttcaacggcatacctaacgcttttaatgcctgcgggtctgctgctgccagccgctgaggcgtcgggaagcagatatactccggaaaatcatccagccgttcgccataaagctgtgccactctggcggtcaattttgccgccatcgccacgctcaccagttggcctaaaatcgcccgcacgccctgctcaaaagcatcaacacagccgggtaaacgcaatccgggccgcgccgcgcctaacctgcccaacgcaccgttaacaatttgtgggttacattgcagatcaaacaggcggctcattttcgccagacactctgcggcaacaggttctaaacctgcacttaaatttatgtgcagagtatggcgggctatatccggaatagcagtcaccacgccgcgatattcgcccaccgccagactacgggcataataactgtccgcgaccgtttccacactgctcaccgcacgggcggcgagaaatcccaacatccagctccagtcatacggcggctgccagttcagggtatacatcgcatctccttattcatccgctttcagcataaacgttattcagacgctgcgctttgctttcatattccggttgtcgcgacggcaacatttcgctaaagtcacgccccttcttcaccggcatggggattatttcgtgtttattggttttgattacggtacagcaaactgtagtgtggcggtcatgcgtgacggtaaaccgcatttgctaaaaatggaaaacgacagcacgctgctgcctagtatgctttgcgcgccaacgcgtgaagcggtaagcgaatggctgtaccgccatcatgatgttccggcagacgacgatgaaacgcaggcgctgttacgtcgggcgattcgttataaccgcgaagaagatatcgatgttacggcgaaaagcgtgcagttcggtctttccagtctggcacagtacattgatgatccagaagaagtgtggtttgtgaaaagtccaaaaagcttcctcggtgccagcggcttaaaaccgcagcaggtagcgctgtttgaggatctggtctgcgcaatgatgttgcacattcgccagcaggcgcaggcacagctgccagaagcgattactcaggcggtgattggtcgtccgatcaacttccaggggctgggcggtgatgaagcaaacacccaggcgcaagggattctggaacgcgcggcgaagcgtgccggattcagggacgtggtattccagtacgagccggtcgcggctgggctggattacgaagccaccttgcaggaagaaaaacgggtgctggtggtggatatcggcggtggtacgactgactgtagtttgctgctgatggggccgcagtggcgtagccgtctcgatcgtgaagccagcctgctgggtcacagtggttgccgtattggcggtaacgatctggatatcgcgctggcgtttaaaaacctgatgccactgctgggtatgggtggcgaaaccgaaaaaggcatcgccctgccgatcctgccgtggtggaatgcggttgccatcaacgacgtacctgcgcagagtgatttctacagtagtgccaacggtcgtctgcttaacgatctggtacgcgatgcccgcgaaccggaaaaagtggccctgttacagaaagtctggcgtcagcgtttaagctatcgcctggtgcgtagcgcagaagagtgcaaaattgctcttagtagcgtagcggaaacccgcgccagtctgccgtttatcagcaatgaactggctacgctgattagccagcgagggctggaaagcgccctcagccagccactgacgcggattctggaacaggtgcaactggccctggataacgcccaggaaaaaccggacgttatctacctgaccggcggtagcgcccgttctccgctgattaaaaaagcgctggcagaacagttgccgggcattccgattgcaggcggcgatgactttggctccgtcaccgccgggctggcacgctgggcggaagtggtgtttcgttaattgaaaaatggctcagcagcggcttaaatctgcctgcgcctgagccagtttttctgctgcctgacgtaacggttccatcaacggcatggtccgtgctggagcatgaaggcggaatcgctgcaactctgtcgcgccgactgtcaacgcgctttccagccgatgtcgtttggcggtcattttcgccattaccgcttgtctgtctgctggcgttatcgcttcattcggcctgaacacaaaacggcgttcacagctcgctttccagtcgataaccgcctgggtcagatggtcgccaaaccctttcacttgcttaacgccacgacgggtaacatctgcggctgtttcaataccaaaagaccgtaacgccgctttacgcgcagggccaacgccgggaatagaggcaacatcaataaaaaatccctccagaaacttctgcttctgccgttcccttgcagtgtcatgaagtgctgccagagcgcgtttctcttcttccggtaacccgagaatttcgtccttcattttttcgagcatcgtccgtttggcgataaaaccttccaggccgcctacctgctggatctggcggactaaatggtcatagtccattttcgcacgattaaatgcctcacggcgttgctgaacttctgctttgtacgctttgcttgtcagactgccaataatccagatagccgccagcacaggaaccaaaataatataacgcggttctgcctgaaggccgcaaagcagcaggcttaatgcactcagtgcgatctcaagcagaatgatgtattcgcgccgtaacaggcctaaaggaagcggcctgccagtcggttggaaatgatcgggtaatggcagttgcaatgctggcggtgctacactcgccatcaccatcgcccagactttcgccagcacaaaattcccgccggtggtaatgacctcttcgccgagatcaataaaatagataacaccttgattatccagcgcacaccacgggcagtcagtcaaatgagcggggtaaacatgcattgcactaacgatacatttctttaactgttggcgtagagagtccagtgccgctacccacgctttagccgtcggacgcccggttgccacgccactttccgtgaatgcctgctgaaacatggcttcaacatcactcggtaacatgcttagcggaatagatcgtggcggcggttttaaaccacgtcgctgattatcactcgcgtaggcataacggaaatgggtaatatccgtctccagcgcattacccgcatcagagataagcggcacaccagaataaggatgccgcccaccaaacaagacgtgaaaaattagcaacgcaaggccaaaattatcgtgattttctgtgcgttcaaaaccgacaaaacttggcaaggtttgtagctctggcggcgtaaaatggctcacgccgacttcgcataaatgcagtgtgccattggcgttaatttgaaaggagtcgctatcaatcagtaccactttgctgtcgcgacctaccataaaactgttctggtttacgtcacccacgacgtgcccgtgctcgtgaaccgtagcaaaagaactagcaatattgcgcgcaacatagagtagaaaatcccacgcacaatgagggtaactctggcgacgatgtgccgggctatagatcatatgaatcggttctttaccagaaacttttggcatcataaaaccgataacttttccgcctcgtccaccgtgaagcgttgcctgcggccaggcgacataattcaacaactgcgcgtcagctgtcgcagccataaaggcaagtttgtcctgttttaaggcgggtggcggcgtgtgataaatcttggcgacgctatcgacaaactcctcgatatcataaaccgcgccttcaccacctttgcccagttcacggccaagagtggtcaattcacctgtgcttgtaaatacttttatatttgttttcataatatttcgcgggtagttatattatatttcaatgaataataacaactaaccattaaaattatttctatatggggaaaacccactcaagaataaaaatgataatgcaattttatcaggatacaattcaatttcggcctgataatgattaacttccacaggtttttgctaactttgactacaaagggattctggagaaaaaatgaaaaagatattacttatgttgagtctgctattttttactaccgcgggctttagtgaagttagcgatacgttagtgacgggaggttatgataaacaagcgatgtctgacgcgattaaacatgcgcggaaagaaaccgataaattcatcgaggttatgaataaaaaagatgccgatactttcgcagtcaaagccccgataaccgatcacggaagaaccgagcatttctggcttacggatgtcacttattctaacggcatgtttattggcgtaatcagcaatgaccctggtattgttacaaacgtagaatatggccaggagtggaaaatcaagaaagaagatattagtgactggatgtatacgcgcggggataaaatttacggcggttataccattgatcctttattggtcacctatccaaaagaagaagccgacgagctaagagcaaaattagttcgctaatcagccgttatatttattgtttaaactggcggttgaattgttgtcttcaaccgccatgagaaactcactctgcccacagcgccagtgccaacgttttatcatcatccgtacgctcgtttaccgccgggctggacaaaaactgctttaacaattcaggtaataaatcgagttgttcctgcgttgctgccgccagtccattgaaaaacggggtaaagaaaggcacatgaggagaattatccagcatatttaacgccagtcgctggataccatccgtaaatgctgcaactttgtgcgcacgcccagtgctggtgagagtttccagtctggaaacggcatcttcgtcggtaatgaagtgcgtcatgttggcatattcacccgccatcggcgtgagaggcaattgcagaccgtgacccaaatctaccaccacgccgccatcgccaatctgcataatcaaggtgccgtcagggctactaatcagtcccagaaatgtgcaggcaaaatcgcgaaccgctaattctttggcttccgcctcggcaaaaagtcgttgacgaatggtcagtaccatatttgtggcgaggacatcattaagccccaattccccgccctgcactttttggctcatataagccatcgcttcattgacggcgagcatcgcgccttcgccaccctggctgacactgcctgcgccatcagcgacaaatacgctcaataatggctgctggtcatttaaccaggcaatctgcatctggcaggcatcctgacaaggcaagtccgcgctgatgtggctcgttccaacggtacttgcatagaccagacgccagctcacacactcgtccagccttttggcgcttccagcacaacttccgttcccggcgtggagcgggaaacgctacgcaggctactggataaccagctaaacagttcacggaattgtaatccttgcagaggcaaaggctgacgaacgctaatttgtgccagcgtcttcatatccgccccctgaacaccgatggaaaagaaagcaaaccttttatcttcttccccccgaaacactttgttggctgcagcctgccactcatcggttggtgcaccatcggtaatcaggaaaatccacgggcgataatagctaataccatttgcacgatactcacgtttccgctcctctaccatatccagggctttggtaatggccgcacccattggtgtatcgccctgggcaaacaggatgggcggaaaaaaattagcggcgctggtaaagggttgttccacatgcaccgggccgaacgtcacaatgccgagttccactctttttaaagccagcggatcagcaagcagttcatcacgaaaggtaaccaatccggcgttaagttcattaataggtctaccgttcatagaaccagaaacatccagcagcaaaatgcaggggcaacgtggttccgggttactggcaaaatcgctggtggcaaacgtgatttgttcgctcataagaaatcctttcttagagaattatcgaggtccggtatcataccgactgcaataatgaaataagagcaaacgaagaaactttcagaattaggcccggcggcgcagaaaattttgctattcgcctcgcaagaacggagagccgtcgattgacactaagggcggagtgacataatttcaggagtgagggttagggagaggtttccccctccccctggtgttcttagtaagcctggaagctaatcactaagagtatcaccagtatgatgacgtgcttcatcataaccctttccttattaaaagccctcttctccgggagaggctttcccgtttcagcgtcccgctgaaatcatcggcttacctcctttcgccctgaatgcagtctatcgctaacgcgtgaataaaatagtttcctctgtgattattgcgtaacgactcgcaaagaatatttgctggcaggatcgcagactacaaagcctgcggattgacaatcttatcgtgaagacatactttcaggagtgagggtagagcggggtttcccccgccctggtagtcttagtaagcggggaagcttatgactaagagcaccacgatgatgagtagcttcatcatgaccctttccttatttatggccccttcctcgggaggggctttcccgtttcagcgtcccgctgaaatcgtcggcttacctcctttcgccatgcaagcagtctatcgctaacgcgtagataaaatagtttcctgtgttattactggatgcgtgctcgcaaatgtgcccgtcattcagacgattccagacagtgtttcataattcctccatttttctcccttattggctggctacactagtatcattccgcgaaacgtttcaggaagagaaactcttaacgatgaaaggtagttataaatcccgttgggtaatcgtaatcgtggtggttatcgccgccatcgccgcattctggttctggcaaggccgcaatgactcccggagtgcagccccaggggcgacgaaacaagcgcagcaaagcccagcgggtggtcgacgtggtatgcgttccggcccattagccccggttcaggcggcgaccgccgtagaacaggcagttccgcgttacctcaccgggcttggcaccattaccgccgctaataccgttacggtgcgcagccgcgtggacggccaactgatagcgttacatttccaggaaggccagcaggtcaaagcaggcgatttactggcagaaattgaccccagccagttcaaagttgcattagcacaagcccagggccaactggcaaaagataaagccacgcttgccaacgcccgccgtgacctggcgcgttatcaacaactggcaaaaaccaatctcgtttcccgccaggagctggatgcccaacaggcgctggtcagtgaaaccgaaggcaccattaaggctgatgaagcaagcgttgccagcgcgcagctgcaactcgactggagccggattaccgcaccagtcgatggtcgcgttggtctcaagcaggttgatgttggtaaccaaatctccagtggtgataccaccgggatcgtggtgatcacccagacgcatcctatcgatttagtctttaccctgccggaaagcgatatcgctaccgtagtgcaggcgcagaaagccggaaaaccgctggtggtagaagcctgggatcgcaccaacagcaagaaattaagtgaaggcacgctgttaagtctagataaccaaatcgatgccactaccggtacgattaaagtgaaagcacgctttaataatcaggatgatgcgctgtttcccaatcagtttgttaacgcgcgcatgttagtcgacaccgaacaaaacgccgtagtgatcccaacagccgccctgcaaatgggcaatgaaggccattttgtctgggtgctgaatagcgaaaacaaggtcagcaaacatctggtgacgccgggcattcaggacagtcagaaagtggtgatccgtgcaggtatttctgcgggcgatcgcgtggtgacagacggcattgatcgcctgaccgaaggggcgaaagtggaagtggtggaagcccagagcgccactactccggaagagaaagccaccagccgcgaatacgcgaaaaaaggagcacgctcctgatgcaggtgttacccccgagcagcacaggcggcccgagccgcctgtttattatgcgtcctgtggccaccacgctgctgatggtggcgatcttactcgccgggattatcggttatcgcgccctgcccgttagcgcgctgccggaagtggactatccgaccattcaggtggtcacgctctacccaggtgccagcccggatgtcatgacctctgccgttaccgcgccgctagaacgccagttcgggcagatgtctggcctgaaacagatgagcagccaaagttccggcggtgcgagtgttatcactttgcagttccagctaacattaccgctcgatgtcgccgagcaggaagtgcaggccgcgattaacgctgcgaccaacttgttgccgagcgatctgcctaacccgccggtttacagcaaagtgaacccggcagatccgccgatcatgacgctcgccgtcaccagtaccgccatgccgatgacgcaagtggaagatatggtggaaacccgcgtcgcgcagaaaatcagccagatttccggcgtcggcctggtgacgctttccggcggtcagcgtccggctgttcgcgtcaaacttaacgctcaggcgattgccgccctcggcctgaccagcgaaaccgtgcgcaccgccattaccggcgctaacgttaacagcgcaaaaggtagcctcgacggcccttcccgtgcggtcacgctttccgcgaacgaccagatgcaatccgccgaagagtatcgccagctaatcatcgcctaccagaacggcgcgccaattcgtctgggcgatgtcgcaactgtagagcaaggtgcagaaaacagctggctcggcgcgtgggcgaacaaagaacaggccattgtgatgaatgttcagcgccagcccggtgctaacattatctccaccgccgacagcattcggcagatgctgccacagctcactgagagtctgccgaaaagcgtgaaggtgacagtgctttccgatcgcaccaccaatatccgcgcatccgtcgatgatactcagtttgaattgatgatggctatcgcgctggtagtcatgattatctacctgtttttgcgcaatattccggcgaccatcattcccggtgttgctgtaccgctgagcttaatcggcactttcgcggttatggtgtttctcgattttagtatcaataacctgacactgatggcgttaactatcgccaccggattcgtggtcgatgacgccatcgtggtgatcgaaaacatttcccgctatatcgaaaaaggcgaaaaaccgttggcggcggcgctcaagggcgcaggtgaaatcggctttaccattatcagcctgaccttcagtctgattgcggtgttgatcccactgctgtttatgggcgatatcgtcgggcgactgttccgcgaatttgctattaccctggcggtagcgattttgatcagtgcggtggtgagcctgaccctgacaccgatgatgtgcgcgcggatgctcagccaggagagcttgcgtaaacagaaccgcttctcccgtgccagcgaaaaaatgttcgacaggataatcgccgcctatggtcgtggactggcgaaagtgctgaatcatccgtggctgaccttaagcgtggcactcagcacgctgctgcttagcgtgctgctgtgggtgttcattccgaaaggtttcttcccggtacaggacaatggcattattcagggcactttgcaggcaccgcaatccagctcctttgccaatatggcccagcgacaacgccaggtcgcggacgtgattttgcaggatccggcagtgcaaagcctgaccagttttgttggcgttgatggcactaacccgagcctgaacagtgcacgtttacaaatcaacctcaaaccgttggatgaacgtgatgatcgggtgcaaaaagtcatcgcccgtctgcaaacggcggtagataaagtgccgggcgtcgatctcttcctgcaaccaacgcaggatctgactattgatactcaggtcagccgcacccagtaccagtttaccttgcaggccacgagtctggatgcgctcagtacctgggtgccacagttgatggaaaaactccagcaactgccacagctttctgatgtctccagcgactggcaggacaaagggctggtggcgtatgtcaatgttgatcgcgacagcgccagccgtctggggatcagcatggcggatgtcgataacgccctgtacaacgcgtttggtcagcggctgatttccactatttatactcaggccaaccagtatcgcgtggtgctggagcacaacaccgaaaataccccaggcctcgcggcgctggataccattcgcctgaccagcagcgacggcggcgtggtgccgctaagcagtattgccaaaattgagcagcgttttgcgccgctctccatcaaccatctggatcagttcccggtaacgaccatctcctttaacgtgccggataactatagcctgggcgatgcggtgcaggcgattatggacaccgaaaagacgctgaatctgccggtggatatcaccacgcagttccagggcagcaccctcgccttccagagcgcgctgggcagcactgtctggctgattgtcgcggcggtggtggcgatgtatatcgtgctcggcattctgtacgagagctttattcacccgatcaccattctcagcacgctacccaccgcaggggttggcgcactgctggcgttgctgattgctggtagcgaactggatgtgattgcgattatcggcattattttgctgatcggtatcgtgaagaagaacgccatcatgatgatcgacttcgcgctggctgctgagcgcgagcaaggcatgagcccgcgcgaggcaatctaccaggcttgtctgttgcgttttcgtccgatcctgatgaccactctggcggctctgcttggcgcgctgccgctgatgttgagtaccggggtcggcgcggaactgcgtcgtccgttaggtatcggcatggtcggcggtctgattgtcagccaggtgctgacgctgtttaccacgccggtgatttatttgctgttcgaccgcctggcattgtggaccaaaagccgctttgcccgtcatgaagaggaggcgtaagtgaagttttttgccctcttcatttaccgcccggtggcgacgattttactgagcgttgccattaccctgtgcggcatactgggcttccgtatgctgccggtcgccccgctgccgcaggtcgattttccggtgattatcgtcagcgccagcctgcccggtgcgagtccagaaacaatggcgtcttccgttgccacgccgctggagcgcagtcttgggcgcattgccggagtcagtgaaatgacctccagcagtagcctcggcagcacgcgtattattttgcagtttgattttgaccgggatatcaacggcgcagcgcgtgatgtgcaggcggcgatcaacgctgcacaaagtttgctgcccagtgggatgcccagccgcccgacctatcgcaaagcgaacccgagcgatgcgccaattatgatcctcacgctgacgtccgatacttatagccagggtgaactgtacgatttcgccagcacgcagctggctccgacgattagccaaatcgacggtgttggtgatgtcgatgtcggaggcagcagtctgcccgccgtacgcgtcgggctgaatccgcaggcgctgtttaatcagggcgtgagcctggacgacgtacgcaccgccgtcagcaatgccaacgtgcgtaaaccgcagggcgcgctggaagatggcactcaccgctggcagatccagaccaatgatgagctaaaaaccgccgctgaatatcagccgttgattattcactacaacaacggcggcgcggttcgtctgggcgatgtggcgacggtgaccgacagtgtgcaggatgtgcgcaacgccgggatgaccaacgccaaaccggctattttactgatgatccgcaaactgccggaagccaatattatccagacggttgacagcatccgggcaaaattaccggagttgcaggaaaccattccggcggcgattgatctgcaaattgcccaggatcgctcccccaccattcgcgccagcctggaagaagtcgagcaaacgctgattatcagcgtggcgctggtgattctggtggtgtttttattcctgcgcagcggtcgcgccactattattcccgccgttagcgtgccggttagcctgattggtacgtttgcggcgatgtacctgtgcggattcagtctcaataaccttagcttaatggcgctcaccatcgctactggtttcgtggtggatgacgccatcgtggtgctggaaaacattgcacgtcatctggaagcgggaatgaaaccgttgcaagccgcactgcaaggtactcgcgaagtcggttttacggtgctgagcatgagtctgagtctggtggcggtgttcctgccgctgctgttgatgggcggattgccgggccgactgttacgcgaatttgccgtgacgctttctgtcgccattggtataagcttgctggtttctctgacattaacgccaatgatgtgtggctggatgctgaaagccagcaagccgcgcgagcaaaagcgactgcgtggttttggtcgcatgttggtagccctgcaacaaggctacggcaagagtctaaaatgggtgctcaatcatacccgtctggtgggcgtggtgctgcttggcaccattgcgctgaatatctggctgtatatcagcatcccgaaaaccttcttcccggagcaggacactggcgtgttgatgggcgggattcaggcggatcagagtattagctttcaggcgatgcgcggtaagttgcaggatttcatgaaaattatccgtgacgatccggcagtggataatgtcaccggctttacaggcggtagccgagtgaacagcgggatgatgtttatcaccctcaagccacgcgacgaacgcagcgaaacggcgcagcaaattatcgaccgtctgcgcgtaaaactggcgaaagaaccgggggcgaatctgttcctgatggcggtacaggatattcgcgttggtgggcgtcagagcaacgccagctaccagtacacgttgttatccgacgacctggcggcactgcgagaatgggagccgaaaatccgcaaaaaactggcgacgttgccggaactggcggacgtgaactccgatcagcaggataacggcgcggagatgaatctggtttacgaccgcgacaccatggcacggctgggaatcgacgtacaagccgccaacagtctgttaaataacgccttcggtcagcggcaaatcagcaccatttaccagccgatgaaccagtataaagtggtgatggaagtggatccgcgctatacccaggacatcagtgcgctggaaaaaatgttcgttatcaataacgaaggcaaagcgatcccgctgagctatttcgctaaatggcaaccggcgaatgccccactaagcgtgaatcatcagggattaagcgcggccagcaccattagctttaacctgccgaccggaaaaagcctcagcgacgccagtgcggcgatcgatcgcgcaatgacccagcttggtgtgcctagcacggtgcgcggcagttttgccggcacggcgcaggtgttccaggagacgatgaacagccaggtgatcctgattatcgccgccatcgccacggtgtatatcgtgctgggtatcctttacgagagttacgtacatccgctgacgattctctccaccctgcccagcgcgggcgttggagcgctgttggcgctggagctgttcaatgccccgttcagcctaatcgccctgatagggatcatgctattaatcggcatcgtgaagaaaaacgccattatgatggtcgattttgcgcttgaagcccaacggcacggtaacctgacgccgcaggaagctattttccaggcctgtctgctgcgttttcgcccgattatgatgactaccctggcggcgctgtttggtgcgctgccgctggtattgagcggcggcgacggcagcgagctgcggcaacccctggggatcaccattgtcggcggactggtaatgagccagctccttacgctgtataccacgccggtggtgtatctctttttcgaccgtctgcggctgcgttttagccgtaaacctaaacaaacggtaaccgagtaaatgacagatcttcccgacagcacccgttggcaattgtggattgtggctttcggcttctttatgcagagcctggacaccaccatcgtaaacaccgcccttcccagtatggcgcaaagcctcggggaaagtccgttgcatatgcacatggtcattgtctcttatgtgctgaccgtggcggtgatgctgcccgccagcggctggctggcggacaaagtcggcgtgcgcaatattttctttaccgccatcgtgctgtttactctcggtagtctgttttgcgcgctttccggcacgctgaacgaactgttgctggcacgcgcgttacagggcgttggcggcgcgatgatggtgccggtcggcagattgacggtgatgaaaatcgtaccgcgcgagcaatatatggcggcgatgacctttgtcacgttacccggtcaggtcggtccgctgctcggtccggcgctcggcggtctgctggtggagtacgcaagctggcactggatctttttgatcaacattccggtggggattatcggtgcgatcgccacattgctgttaatgccgaactacaccatgcagacgcggcgctttgatctctccggatttttattgctggcggttggcatggcggtattaaccctggcgctggacggcagtaaaggtacaggtttaagcccgctgacgattgcaggcctggtcgcagttggcgtggtggcactggtgctttatctgctgcacgccagaaataacaaccgtgccctgttcagtctgaaactgttccgtactcgtacctttagcctgggcctggcggggagctttgccggacgtattggcagtggcatgttgccctttatgacaccggttttcctgcaaattggcctcggtttcagcccgtttcatgccggactgatgatgatcccgatggtgcttggcagcatgggaatgaagcgaattgtggtacaggtggtgaatcgctttggttatcgtcgggtactggtagcgaccacgctgggtctgagcctggtcaccctgttgtttatgactaccgccctgctgggctggtactacgttttgccgttcgtcctgtttttacaagggatggtcaacagcacgcgtttctcctccatgaacaccctgacgctgaaagatctcccggacaatctggcgagcagcggcaacagcctgctgagcatgattatgcaattgagcatgagtatcggcgtcactatcgccgggctgttgctgggactttttggtagtcagcatgtcagcgtcgacagcggcaccacacaaaccgtctttatgtacacctggcttagcatggcgttgatcatcgcccttccggcgttcatctttgccagagtgccgaacgatacgcatcaaaatgtagctattagccggcgaaaaaggagcgcgcaatgaagttctggcgacccggtattaccggcaaactgtttctggcgattttcgccacctgcattgtcttgctgatcagtatgcactgggcggtgcgtatcagttttgagcgtggctttattgattacatcaagcatggtaatgaacagcgattacaactgttaagtgatgcgcttggcgagcagtatgcgcagcatggcaactggcgcttcctgcgcaacaatgatcgctttgtctttcagatcctgcgtagttttgaacacgataatagcgaagataaacccggcccgggtatgccaccgcacggctggcgtacccagttctgggtggttgatcaaaacaacaaagtgctggttggtccgcgagcgccgattccacctgacggtacacggcgacccattctggtcaacggtgcggaagttggcgcggtgatcgcctcccccgttgagcggttaacgcgcaatactgatatcaatttcgataaacaacagcggcaaaccagctggttgattgtcgccctggcaacgttactcgcggcacttgccacttttctgctggcgcgcggtttactggcaccggtaaaacgacttgtcgatggcacgcacaaactggcggcgggcgatttcactacccgcgtaacgcccaccagtgaagatgaactgggcaaactggcgcaagacttcaaccagcttgccagcacactggagaaaaaccagcaaatgcggcgcgattttatggccgatatttctcacgaactgcgtacgccattagcggtgctgcgcggtgaactggaagccattcaggatggcgtgcgtaaattcacgccggagacggtggcgtctttacaggcggaggtcggtacactgaccaaactggttgacgatctccatcagttgagcatgtctgatgaaggcgctctcgcctatcaaaaagcaccggtagatttgatcccactgctggaagtggcgggcggcgcatttcgcgaacgattcgccagtcgtggcctgaaactgcaattttccctgccagacagtattaccgtatttggcgatcgcgaccgtttaatgcagttattcaataacttactggaaaacagcctgcgctacactgacagcggcggcagcctgcaaatctctgccgggcagcgcgacaaaacggtgcgcctgacctttgccgacagtgcgccaggtgtcagtgacgatcagctacaaaaattgtttgaacgtttttatcgcaccgaaggttcccgcaaccgtgccagcggcggttccgggctggggctggcgatttgcctgaacattgttgaagcacataatggtcgcattattgctgcccatagcccttttggcggggtaagcattacagtagagttaccgctggaacgggatttacagagagaagtatgaccgagttaccaatcgacgaaaacacaccgcgtattttgatcgtggaagatgaaccgaagctggggcagttgctcattgattatctgcgtgctgcgagctatgcgccgacgcttatcagccacggcgatcaggtactgccgtatgtgcgccagacaccaccggatctgatcctgttagatctgatgctccctggcaccgatggcctgacgctgtgccgggaaattcgtcgtttttctgacattccgatcgtgatggtgacggcaaaaatcgaagagatcgatcgcctgctggggctggagattggcgcagatgattatatctgtaagccgtacagcccacgggaagtggtagcgcgcgtcaaaaccattttgcgccgttgcaaaccgcagcgcgagttgcagcaacaggatgctgaaagcccgttgattatcgacgaaggtcgttttcaggctagttggcgcggtaaaatgcttgacctgacgcctgcggaatttcgtctgctgaaaacgctctctcacgaaccaggaaaagtgttctcccgcgagcaattgctcaatcatctttatgacgactaccgcgtagtaaccgaccgcaccatcgacagccacattaaaaacctgcgccgcaagctggaatctctcgacgccgaacagagttttatccgcgccgtttatggcgtcggttaccgctgggaagccgacgcctgccgcatcgtttaattttagcgacattattttgttagccggagatggcgttcagaccagatccggcaacattatcccacgcatggtcagcaaactgacattatctctccgccctggcaggcatcagaaaatcgctcatactttaatcggtaaacagcacctttagaatcctgtcgtttgttttcgatttcaaaatataatgaaattatttgtttttaaatatcgagataacgatcacaaaaacgacaatatgaaaattattcgaggagtgaaaggcaaaaaaacggcctcccgatagggaagccgtagcaaagtgcgcgtgtttttatgccggatgcggtgtaaacatacgtggcagtgctatgtaggcatgataagacgcttcagcgtcgcatcaggcataggttgccggatgcagcgtaaacgccttatccgtcctacggggtggtgttgttcgtataaggcgtatcaggcgatagtaattttgctatcgagataaacgtcctgcacggcgttaatcagtttcacgccgtcagccatgcttttcttgaacgctttacgtccaagaatcagccccattccgcctgcgcgtttgttgataaccgcagtacgcactgcatcgctgaggtcagtttcaccgcccgcagcaccgccggagtttatcaacccagcccgacccatatagcagttagctaactgataacgcaccagatcaatcgggttttcgctggtcaatttgctgtaaacacgatcgtcggtgtaaccgtaattaattgctttatagccgccgttattttccgccattttttgtttgacgatatctgcaccgatggttgccgccagatggtttgcctgaccggtcaggtcggcggaaacatggtaatcaacgccatctttcttaaaggcggagttacgcaaataggcccacagcactgtcaccatacccagctcgtgcgcacgttcaaaagccgcagaaatttcttcaatctggcgacgactctcttcgctgccaaaatagatagtcgcaccaaccgcaaccgcgcccatgttgaacgcctgctccacgctggcatacagcgtttgatcgtaggtattcgggtaacttagcgtctcgttgtgattaagtttgacgaggaatggaatgcgatgcgcataacgccggcttacgctcgccagcacgccgtaagtactcgccacacagttacagcccgcttcgatcgccagttcaacaatgtttttcgggtcaaagtagagcgggttagcagcaaaactagctccggcagagtgctcaacgccctggtcaaccggcagaatagaaagatatcctgtgccagccagacgcccggtgttgtacaacgtctgcatattacgtaacaccgctggcgggcgattattgtcaatcattacgcggtctacgtagtcatgtccggggagataaagctggtcagaaggaattgtcatacaacggtgctgtaaaaggttgtcggcgtctttgccaagcaactgcgcaatatctgtcattactatgctcccgtaaattccgattggatatcggctatggattgtcctggcccgccttttgcgggcaatcataatcctggtcgttacgggcgagtttttccatcttttggatgttttttcagcgttttctgttggctcgattcatcagaaaaaatgttagcgcggtcaagttttcaccgcaaaggtatttaaaaggtattattaagtggtattgtcatcgcgtaccttacattacctgtcatgaaggaattaaaagatgaaaacaacagcaaagctgagcttcatgatgtttgttgaatggtttatctggggcgcgtggtttgtgccattgtggttgtggttaagtaaaagcggttttagtgccggagaaattggctggagctatgcctgtaccgccattgcggcgatcctgagcccaattctggttggctccatcactgaccgctttttcagcgcgcaaaaagtgctggcggtattgatgttcgcaggcgcgctgctgatgtatttcgctgcgcaacagaccacttttgccgggttcttcccgttactgctggcctacagcctaacctatatgccgaccattgcgctgactaacagcatcgcttttgccaacgtgccggatgttgagcgtgatttcccgcgcattcgtgtgatgggcactatcggctggattgcctccggtctggcatgtggtttcttgccgcaaatactggggtatgccgatatcagtccgactaacatcccgctgctgattaccgccggaagttctgctctgctcggtgtgtttgcgtttttcctgcccgacacgccaccaaaaagcaccggcaaaatggatattaaagtcatgctcggcctggatgcgctgatcctgctgcgcgataaaaacttcctcgtctttttcttctgtagtttcctgtttgcgatgccactagcgttctattacatctttgccaacggttatctgaccgaagttggcatgaaaaacgccaccggctggatgacgctcggccagttctctgaaatcttctttatgctggcattgccgtttttcactaaacgctttggtatcaaaaaggtattattgcttggtctggtcaccgctgcgatccgctatggcttctttatttacggtagtgcggatgaatatttcacctacgcgttactgttcctcggtattttgcttcacggcgtaagttacgatttttactacgttaccgcttacatctatgtcgataaaaaagcccccgtgcatatgcgtaccgctgcgcaggggctgatcacgctctgctgccagggcttcggcagtttgctcggctatcgtcttggcggtgtgatgatggaaaagatgttcgcttatcaggaaccggtaaacggactgactttcaactggtccgggatgtggactttcggcgcggtgatgattgccattatcgccgtgctgttcatgatttttttccgcgaatccgacaacgaaattacggctatcaaggtcgatgatcgcgatattgcgttgacacaaggggaagttaaatgaaaacagaacgtattctcggtgctctttatgggcaggcgttaggggatgcgatggggatgccctccgagctttggccacgcagccgcgttaaagcacactttggctggattgaccgttttcttcctggaccaaaggagaataacgcggcctgttattttaaccgcgccgaattcaccgacgataccagcatggcgctgtgtctggcggatgcgttactggaacgtgaaggcaagatcgatccggatctgattgggcgtaatattctcgactgggcgctgcgtttcgacgcctttaacaaaaacgtactaggtccgaccagcaagattgcgcttaacgccattcgcgacggtaaacccgttgctgaactggaaaacaacggcgtgaccaacggcgcagcgatgcgcgtcagcccattaggttgtttgcttccggcgcgtgatgttgattcctttattgatgatgtagcgctggcgtccagcccgacccataaatccgatctggcggttgcaggcgcggtagtcatcgcatgggcgatttctcgtgccattgacggagaaagctggagtgcgattgttgattccctgcctagtattgcgcgacatgcacagcaaaaacgcatcactacgttcagcgccagtctggcggcgcggctggagattgcgctgaaaattgtgcgcaatgccgacggcaccgaatccgccagcgaacagctttaccaggtcgttggcgcaggtaccagcactattgagtccgttccgtgcgccattgcgctggttgaactggcacaaaccgacccgaatcgctgcgccgtcctgtgcgctaaccttggcggcgacacagacaccatcggtgctatggcgacggcaatttgcggcgcgttgcatggcgttaacgctatcgatcctgcgttaaaggcggaactggatgcggtaaatcagcttgatttcaaccgctatgccacagcgctggcgaaatatcgtcaacaacgggaggcggtatgagcggcgctcgattacacacgctgctgcctgaattaaccacgcgtcagagcgtgatggtcgtcggcgcggcggtcattgacgtgatcgccgacgcttatgccctcccctggcgtgggtgcgatatcgaactgaaacagcagagcgttaacgttggcggctgcgcactgaatattgccgtggcgttaaagcgcctcggcatcgaagcgggtaatgccttgccgctcggtcagggcgtgtgggcggagatgattcgcaaccggatggcaaaagagggcttaatcagcctgatcgataacgccgaaggtgataacggctggtgtctggcgctggttgagccggatggcgaacgcacttttatgagtttcagcggtgttgaaaatcagtggaatcgccagtggctggcgcgattaaccgttgcgcctggcagcctgctctatttttccggttatcaactggccagcccctgcggcgaattgttagtggaatggctggaagagctgcaagacgtgacgccgtttatcgattttggcccacgtattggcgatatcccggatgcattactggcgcggatcatggcctgtcgacctttagtgagcctcaatcgtcaagaggctgagattgccgccgaacgttttgctttatccgcagagataacaacacttggcaagcaatggcaggagaaatttgccgcgccgttgatcgttcgtctcgataaagaaggcgcatggtatttcagcaacgacgcttctggctgcattccggcatttccaacgcaagttgtcgacaccattggggcgggcgacagtcatgccggtggcgtacttgccgggctggcctctggtctgccactggcggatgccgtattactgggcaatgcagtggcgagctgggttgtcgggcatcggggcggtgattgtgcgccaacgcgcgaggaactactcctcgcacacaaaaacgtataattactcctcgcacacaaaaacgtatagatcgctgcgacagtggctaatgctgtactcaataggccgttgctgttggtcaagcgccacttgcttgatcaccagcaccggtattttgctatctaactgaatatgactctgaaactcggcatccggcatccgggcgctaacgcgggaacgcgtacgttgtgggtaaatgtgctggctgcggaaatagtcataaagactaatcccgatggcatcaacatcatgaattaaatgcgccggaacccagctttcctcaatgcttaccgcttcttcatcgacatagcgaatacgcttaagcaaaaagacatcacttcctgcttcgaccgccagctgctgcgcgacttcttcgggacatttcacgacacgcttgttaacccatagcgtatcgggctttttcccgcgcaataccacctgctgagaaaaacctcgcgcttctttcaagctgtattcgaagatgttgttgatctgcgtgccgtaaccgcggctacgcgtcaccacaccctcttcttccagcgcctgcatcgccttgcgcaccgtaatgcggctaacgccggttaactgacttaaatcacgttcaccgggcaaaatattgccatgctccagcaccccgctgcgcacggcattttttaccgtttcggcaaacttaatataaagcggcgtgttatccgccgctaaaatacgctcgttcagttgggcaatcagctgggtatgcgcttgttccatttgtctttttcctgccggggagtctggtgggagtatatcactgcttcttatttaaggcgtttctttaatcccatcaacgaatgcctgcaactcctccaccgtgccattaaatacattaaaatccaccggaccattgatgccatctacctgtccacggtcggaatgctgccagaagcgccaggccattccgtcattgtccggacgacgttgatagtagtgagccacccaccacggatattcattgaaatagcccgccagattggtgtgataaaaaacggctccactgtaaataatcggctttttccccgtacttttttcgaccatttttagccactgacttacccgcttgcgtaattcttttgcgcttaattttccccgttcttctacgtccagcacggcagggaaatcgccttgactgaaatccaccgtttgcagaaataatctcgcctgaacactagcggatacgctcggggagaaataatgatacgccccacgcagcaggccattttcgcggcttagttgccagttacggctaaaataggggtccaccagcttttcgccttccgtcgccttaataaaagcaaactgtaagcggataccattgtcgcgcatttttgccacccgctgccagtcgatccgctcctgccagcggctaacatctattccgtgaatggtgtaactggcaggaatgcgaatagcgaaagatttaaccgggcgataaccgtagaagtggatgtagtctgtaatctgaactgctgtgctatagaaaaaattcaccgtctgacgcggataaattgcaacgatggaaattagcccaagagcgcataatagagaggtgagtttttttcgactggtaattcttagctgcattggtttcatccctgaatgtcagtgccaaaggctgacaataaccaaagcagctatagtacggtgctcaccaccaggcgtggaagtggtgaaccggaccaataccgtgaccaacttccagcgtgtcggcctgggctaacgcgctactaagccagctttttgcctcctgtacggtgtcagcccagtttgtatggcgcgggcgtagtgcagccaacgccgcagagagtgtacaaccagtgccgtgggtgtttttggtcataatgcgcggtgcggtaaaccgttgttcaccctcgcgggtaaacagccagtccgggctttgctcatcatccagatgaccacctttcattagcactgcgccacagcccatcgccaacaggcttcgcccttgttccagcatttcctgttcggtgcgcgcgtgtggcgcgtcgagcaaggcggcagcttcgggcaagtttggcgttattaaactaacctgtggcaataatcgactgcgcagcgtagcaaccgcgctaggactaagcagcgggtcgccgctttttgccagcataacggtgtcgagtaccacgttttggatctgataacgttgcaaccgttctgccaccgcttcaacaatatcggtttccgccagcataccgattttagtggtatcgattcgcacatcgctgaacacgctatcgagctgggcggcgacaaaatcaggctcaatgcgatacacgctctgtacgccacgggtattttgcgccaccagtgcagtaataacactgcaaccataagcgccaagtgcgctgaaggttttaagatcggcctgaatccccgcaccaccactcggatcagtaccggcaatcgtcagagcgttaattcgtttcatgcctgcacctcctgcgtcaattgccagagcgcatcaaggaaatgtggaacaaaactgcctggcccctcgcttctggcgactgcgcgttctccggcttgtttcatccagtgacaggcagatgcgacattttccagcgtatcgcctggtaacgcacagcaggcagcgacaaccgcgcttaatgcacagccagttcctaccactttggtcattaacggatcaccaccgtgaataccaatgatacgatgtccatcggtaacataatccatctcgccagtgaccacgacgattgcgccagtttcccgtgccagtgtttgtgcagcgggtatcgcgttagctgcggcgtcagtggtatccactccccgtccgccattagcaatgccagctaatgccatgatttcgctagcattaccacgtatcgctgccggtttaaaagataaaagttcatgacaaaaatggcggcgataatcgagcgcacccaccgctactggatcaagcgtccagggtgtttgagagctttttgcttgctcaacggcagcacgcatcgcctgagcgcgtggctgcgtcagtgtgccaacgttaatcaacaaggcactggcgatagccgcaaactgactggcctcttcggtttcgataaccatcgctgggcttgcaccgagcgccagcaaggtattggcggtaaaggtttgcaccacatcattggtcatgcagtgcacaagaggggaatgttggtgaaaaaggtgtaacgcgtgcgcagattgcgcactacccagcaggtcgacttgcatagtttgctcctgccataacgtgaagaagcaatgacctggtggtccgtgacttccctacgctggcattatccagatcaggtgatacgggtatttctcagccttcacgcagaagggcaccccgagtcgtttggttgcgatgataaatcgcagaggaggatggtaatgtccagcgcacgcgttgtaaacgaggaaaaacggcagttttacaatcgcgttaataaattatttgatataactatccagcaccttcagaacgacatccagatcttcttcacgttttagctcatccccctggtgaacgatgtgttccgtcagatgacctttaatcacttcccgcatcagaccgtttaccgcgccacggatagcagcaatctgttgtaaaactgcagcgcattcgtgcggctcgtcgagcattttcttgagcgccacgacctggccctgaatcttactggcacgcgctttcagtttctgtttatcacggattgtatgagacatggcaacacctggttaacaagaatatgaaaaatcatagcactattaatctactggggggtagtatcaggtactgggggggagtagaatcagattgccgaattaatactaagaattattatcatgaccgaatttacaactcttcttcagcaaggaaacgcctggttcttcatccccagcgccatcttacttggtgcgcttcatggcctggaaccagggcacagtaaaacgatgatggcggcgtttatcatcgccatcaaaggcaccattaaacaagcggtgatgctcggactggcagcaactattagccataccgcagtggtctggttaattgcctttggcgggatggtgatcagcaagcgctttactgctcaaagtgcagaaccgtggctccagctgatttccgcagtgatcattattagcaccgcgttctggatgttctggcgtacctggcgcggcgaacgcaactggctggagaatatgcacgggcatgattatgagcatcatcatcacgatcacgaacatcaccacgaccatggacatcatcaccatcacgaacatggcgagtatcaggatgcccatgcacgagcccatgccaatgacattaaacgacgctttgatggtagagaggtcaccaactggcaaattttgttatttggcttaaccggtggccttatcccctgcccggcagcaattaccgtgctgttgatatgcattcagttgaaagccctgacactgggcgcaacactggtcgtcagtttcagcattggcctggcgttaacgcttgtcaccgtaggcgttggcgcagcaatcagcgttcagcaggtcgcaaaacgctggagcggatttaacactctcgctaaacgcgccccctatttttccagtctgttgattggcttagtcggtgtgtatatgggcgtacatggcttcatgggcataatgcgataactcaatcctttaggcttgcatgttatcttcagcccaggatgattcttaaatcagctatttccgctgactctctgctcgctaaggatgcttttagggcatcctttcatttacactttttacgaaatcatgggatcactaacaaaatatcgcttgtcagttatattgtatggcaggaaagatatgcgactgatattacagatccccaaagtggagagtttatgaccattaaaaataagatgttgctgggtgcgcttttgctggttaccagtgccgcctgggccgcaccagccaccgcgggtagcaccaataccagcggaatttctaagtatgagttaagtagtttcattgctgactttaagcatttcaaaccaggggacaccgtaccagaaatgtaccgtaccgatgagtacaacattaagcagtggcagttgcgtaacctgcccgcgcctgatgccgggacgcactggacctatatgggtggcgcgtacgtgttgatcagcgacaccgacggtaaaatcattaaagcctacgacggtgagattttttatcatcgctaaaaaaagccccctcatcatgagggggaaatgcagacaccttgttattttttattattagccacttgctcgtcttgcttgttattagtcgtatttcacgttgattaatgcggttgcctccagtgcgccagatttaactttgtttgtatcgtagacgtagtaactggctgttatcggaatactaaccgttgtatctgtaagtttactcttcgccgcaacttcctttaaatttgtatatcctttactgctgttagtgatatttaaaagtgtgactgggctaccattactttcaagaataaatcctacgccattatcttccgcacctttcagtattgtgttgctgttggttaacaagtcagaactacttaaatacacctgcattttccgacttgtttgattttgttgacctaataaatttttacaacgcagaataatatccccttgtttactatttattgttgctttgttacctgtggctggtaattgactaacgggaatactgtctaaagtaattaataaatcgtccggtttgcaggttgtggttatcgggttgtaactcaatgtcagattaaaggaatagacacctgcattttgtgccaatgcatttctgtagctatttacacatgcatcccaactcttgccacctaataaacacagtagaaattgtactgcggcactcccgcgtgtgctactactagcactggataatgtcgcaacaccattaatcatcacactaccgccgccccccgcagaaacattcacttttgcattactggccgcaggtgtcaccgtaacactataaccactggtgaaactggtctgattattactcaacgtgatgttgtttttattggtccattcaaaatgtaaatttaattttatggtatcgttataaagtccaacaataatatcgctcgggctcataggggtgatagtatttgtacttacgcaactgctatcattaaaattatgctcatatgtcgccatttgtgtttgagtaagtgcaaaatccccctgaacaaccaagttgtgctgaacagataactcactataacatgccgcatagctcacaggcataaccatcatcattaatataaatagcattatgcgaatttccatagaaccacctgactattactggcaaatataatttctactttcatcaatctctttaccgaaggtgattgtgcaactaagtccttgttgcttatcaattgccacattaacgcttggcggtacttcattggtgcgaataaataactgacttccctggccgacaacgccaatattatgaccatggatatcattgacttcataaccaaacgttaaactttgcccatctgctcttaacgcttttataaaccatggcttgcgctgatcggtatcaaaattaaccagtacaaccgcgccgcgataaggggcggcaattttccggttgccacgtaattctgcttcgctatcgctttggctcacatccagcatcaggtgattttcccgataaggtgtcattccgtcgtatatcaccactccattacggtttgttgtgcgatatttttgcccattgacataagcatctttaattcctggcgcattcatcacagcaaacgtttcggaaagacggttcgccagattaacgccaccgctccaggcgacaatgcccccactaacactggctccagcctgtcgataagtactgctctgactataactgccattcactgtcgcaaccggcgcgttccaggtcaaattcgccccagctgtcgtttcatttccctgatgttgatgactcaggttgacaccataattgaactgatcccgactccctactgttccacttaatcccgtattattactggcaaacccctgatcatcaaacgtcgtactgttagacatatatatttgccgacgaggcgtgctaacgtcatcaccccaatcaaagggaatgcttataaaaatattaaaacgtttctcttcatgatgattctcgtcataagcctggcttgccgcgagggtatagcttatccgtcgcaggttgttggaataactcaactgataatccttactactgccgctacgcccccagtaatctcgccataacgtacttaaactcacagacccccaaccttctggcaaactctggctcatattggcggaaaagctatttttgcggccaaaatcgttctggtaataatcggcaatgtcatagacatcgttttcatcacggcgataattatctttattgtttgcccaaacgtgatcgttaaatgtccggtaatcacggctgctataacgccaggccgccagaccaaaacgcgtgctcgtttggctcacaaatttgttgtaggcaatttgataactttgcccgtcaaacacatcgccgttgtcttgtttactatggctcttagtggcatcgacggaaatggcaccaatgcgtgtattccagccagcccccaaagtaaacgcgtaataattattcgcgaccatgctgccaccatacagcgtcaataaattattaaaaccatactgataacccgcctggacaaaatcactttgtttgctcgccccttcaatatggctacgacccgccgctaaatcatatttgctcacgccgggttgcagcatatttggcaccgctgcataaggcaccagataggtggttacgctgccgtccgcctctttcacgctgacatcaagatctgctccaccaccggccaactgcaaatctgtaatcgcgaacgggccaggaggaacctctttctgataaaccacaaaaccattctgttcaatagttaccagcgcgttactctgagcaatcccctgcacccgtggcgtaaaattttgtttgctgttaggcaacatctgcatatcacgaaacaaccgcacacctctgaagcgaacagaatcaaaaatatcgctacttgtgtacatatcacccacgcgaagcgtgccgagaagttgggcaaatccacgttccagatacagggtattgcttttccacacccctggattgttatttgttttactgaaactggcatcagaatgcagttgccaccccagtaaatttaacccgctgttaaaacgtacatatgtactcttgttattaccgctcgctttatagtcgctgtaatactgactcagataataagaggtataaaacgcattaataccccgctcccagttttccggtggaacatagccactttccagttcttccacccaggcctgcgggacactgaaatcgagacgaaaaaccccgatatcccaggtatagctcccaccctgaacaagttgctcaaatgttaaacattgcttaccgctggcgaagttatcgctattaatgcctaaccgcttgataacttctctacttaaacatgtttcttgcgggttgtctttaacaataatctcatatttcccgcgccattgcttattgacataaatatcgatgtcatactgccccggtaagggttgattatcatcaagacgaatatttgcaacctgctggtctttcattccacctatcataaaatgggtatcaaaggtttcttcagctgcataagcttcaatgccgagcaataacgctacgattgcacttgcaagtggggtcattctcaacataggcagctcctgcaattaaattttgtcactaatatagttgccatggtcatcgataatggtcagatgccagttatttgcattattacttttgacattaacactctgactttctaagggggcaatcataatagtttcataattgactttgacattattagctttgacatcgctaatcgtcacccaattagcactgtcattttttatcaccaaaccattgccactgcgatttaccagcaattttttaaatgtcgctttatttaccggagcaatacccgctggccggtaaaacaacttaattctgttttgcatcgcaaacttcagtgcattcttaccttcttgctctggactatttggtggaatatccagaacattcagataaaaaatgctttctttattagtgggcagtttattcggcataattttgatttttacttgctgcccggaatttgcccctatttttgccactggtggcgttaacatgaaaggaacctgaattttttctggtggtaaactcgtatcgccatcatcaatccacgcctgcagcaggctagaacggtttccctggttcatcaactgcaccatcacttctttattttctgccgggtaaataatgcgcgtcccgtagataacaattccggcatgtgcaggaaggaccatagaaaaaatgagtaaagataataatcctttcattttaatgcctcttaaattaaaaggccgccatgggatagcggccatgtttattacctggagaaacttacaattttatttattaatcctgcgccacacgcataaccagagaagataacacatcaccactttgcacactgttatctgtcagtttcaggtattttgctttaaacggaatagcatattgaccttccgctgttttataactctcaatgttaaaaggtgcagaaacatccaggacatcgctgttatcacctaaatagagatagtaacccacggtatcgttgctactggctatcgccttatcgttaccggttattttatcgttggtaatcaagctgagttttacaccagcaacttctttcgggcagctaatttttaacatgctgctggttacaccgactgcatcatcataggtagaatatttagctttaccttcaaagacactggttggtacagtcggcatattaatacttacactatcaccacccgcttcgaatttacacggagattctgcaatattccccttaatagttaatgttccggtatcaacgtctgcagcaaatactccagcgctcataaaaaaagaagaaaagacagcggcagcaataatactacgtttcataatatgttccttaataaaatttatttttggttgttaagagtctgtatctcttggaaacaaatttctcacatcaaaaaagttgccgcaatgtaaacacattgttttattgatttaaaacaaattaaccattgcaatataaatacaaaaaatatttaagagtattaactatttatcgcatctatcaattaatgtagatttatgtaaatggtattgttgatatcaataaaaaagccgaaatcatttatataaatgatttcggctttctaaatgcaattaaaatcaggttgccaaattaatcgtagcgatttaacacgattcgacgtttgctatcgctacctgcaacaaccacttctgtcgttacacctttgacggggctagaaaacagatgacgggtgtcaacattatacgttaactgaccacaatgctgttgaggttgaccattaaccatagccatactgcatgttgggggactgatcctgccattaatcgctaatgtggcagtctcactagagaatgcgggagaagccaatccataggcaagaaaaataattccactcagccaatacttattcattgaacgttatccctgtagtaaaggttatgcctggatagaatgagtgcataacaaactatagctgtacatccactacacagccacgaaggatgataatgaagcattgcctgtatgatcaatcgactttgtagagtttcggacgaaggtccgcagaatattcgcagtattaaataagtgttcattaatgcggcaaaaactaatacaccgcatcaatgtaacatctctgcggtgtatgaagaataaccagaatggttaataggcgttagaccgcgcggaaggaaatctcgcctggaatgacttcaccctgccagtagagctgagctgcaacgcggtcagccagctggcggtagatagcggtaaattcgctctccggacggctgataaccgttggcgtacctttatcgagatcctcacgtaaggagatgtgtaacggcatctgccccagcagctgtgtatggtatttttcagccagtttctctgcaccaccggtaccgaaaatcggttcatggtgaccacagttactgcaaatatgcacactcatgttctcgacaataccgagcaccggaacctcgactttctcgaacatcacaatgccttttttcgcatcgatcagcgcgatgtcctgcggggtggtgaccacgactgcaccggttactggaatgttttgcgccagcgtcaattgaatgtcaccggtgcctggcggcatatcaagcaccagatagtcgagatccggccacaaggtttcctgcaacatctgcattaacgccttgctcgccatcggtccacgccacaccatcgcattgtcgtcagtgaccagataaccaatactattggttgccaggccatgagacataatcggtgccatatgggtaccgtccgggctagttggacgctgattttctgcgcccaacattgttgggatacttgggccgtagatatcggcgtccagaatgccgactttcgccccttctgccgccagcgccagtgccaggtttaccgccgtggagcttttacccacgccgcctttaccggaactcaccgcgataatgttcttcacaccgttaattcccggctgattcttcacgcgtttcagagtggctatgttatggctcagtttccagtcgatagctttcgccccggtgatgcgcagcagttcggcgctacattgctcttttaactcttcgaacgcgctatgccagacaaacggcataaccagttccacatgcaacgtgtcgtccatccaggcgacatggtgcaacgctttcagcgtggtgaggttatgcttcagggttgggtgctgaaaattggccagtgtcccggcgaccattgcgcgcaaggcttctggacttttggcctgggattgttcgttcatcccgactccttttttgtatagataaaccatcagctgatagtttacctgaagaatatagagaagtacttacttaacattttcccatttggtactatctaaccccttttcactattaagaagtaatgcctactatgactcaagtcgcgaagaaaattctggtgacgtgcgcactgccgtacgctaacggcagtatccacctcggccatatgctggagcacatccaggctgatgtctgggtccgttaccagcgaatgcgcggccacgaggtcaacttcatctgcgccgacgatgcccacggtacaccgatcatgctgaaagctcagcagcttggtatcaccccggagcagatgattggcgaaatgagtcaggagcatcagactgatttcgcaggctttaacatcagctatgacaactatcacagcacgcacagcgaagagaaccgccagttgagtgaacttatctactctcgcctgaaagaaaacggttttattaaaaaccgcaccatctctcagctgtacgatccggaaaaaggcatgttcctgccggaccgttttgtgaaaggcacctgcccgaaatgtaaatccccggatcaatacggcgataactgcgaagtctgcggcgcgacctacagcccgactgaactgatcgagccgaaaagcgtggtttctggcgctacgccggtaatgcgtgattctgaacacttcttctttgatctgccctctttcagcgaaatgttgcaggcatggacccgcagcggtgcgttgcaggagcaggtggcaaataaaatgcaggagtggtttgaatctggcctgcaacagtgggatatctcccgcgacgccccttacttcggttttgaaattccgaacgcgccgggcaaatatttctacgtctggctggacgcaccgattggctacatgggttctttcaagaatctgtgcgacaagcgcggcgacagcgtaagcttcgatgaatactggaagaaagactccaccgccgagctgtaccacttcatcggtaaagatattgtttacttccacagcctgttctggcctgccatgctggaaggcagcaacttccgcaagccgtccaacctgtttgttcatggctatgtgacggtgaacggcgcaaagatgtccaagtctcgcggcacctttattaaagccagcacctggctgaatcattttgacgcagacagcctgcgttactactacactgcgaaactctctagccgcattgatgatatcgatctcaacctggaagatttcgttcagcgtgtgaatgccgatatcgttaacaaagtggttaacctggcctcccgtaatgcgggctttatcaacaagcgttttgacggcgtgctggcaagcgaactggctgacccgcagttgtacaaaaccttcactgatgccgctgaagtgattggtgaagcgtgggaaagccgtgaatttggtaaagccgtgcgcgaaatcatggcgctggctgatctggctaaccgctatgtcgatgaacaggctccgtgggtggtggcgaaacaggaaggccgcgatgccgacctgcaggcaatttgcagtatgggcatcaacctgttccgcgtgctgatgacttacctgaagccggtactgccgaaactgaccgagcgtgcagaagcattcctcaatacggaactgacctgggatggtatccagcaaccgctgctgggccacaaagtgaatccgttcaaggcgctgtataaccgcatcgatatgaggcaggttgaagcactggtggaagcctctaaagaagaagtaaaagccgctgccgcgccggtaactggcccgctggcagatgatccgattcaggaaaccatcacctttgacgacttcgctaaagttgacctgcgcgtggcgctgattgaaaacgcagagtttgttgaaggttctgacaaactgctgcgcctgacgctggatctcggcggtgaaaaacgcaatgtcttctccggtattcgttctgcttacccggatccgcaggcactgattggtcgtcacaccattatggtggctaacctggcaccacgtaaaatgcgcttcggtatctctgaaggcatggtgatggctgccggtcctggcgggaaagatattttcctgctaagcccggatgccggtgctaaaccgggtcatcaggtgaaataatcccccttcaaggcgctgcatcgacagcgccttttctttataaattcctaaagttgttttcttgcgattttgtctctctctaacccgcataaatactggtagcatctgcattcaactggataaaattacagggatgcagaatgagacactttatctatcaggacgaaaaatcacataaattcagggcagttgagcaacagggaaacgagttgcatatcagttggggaaaagttggcaccaaagggcaaagccagataaaaagtttttcagatgctgcggcagcggcaaaagcggagcttaagctgattgcggagaaggtgaagaaggggtatgtggagcaagcgaaggataattctttgcaaccttcccaaacggtaacgggctctctcaaggtagcggacttatccaccattattcaggaacaaccctctttcgtagcagaaacccgtgcgcctgacaaaaatacagatgctgttttaccgtggctggcgaaagatattgctgtcgtttttccgcccgaagttgtacacaccacgttaagtcatcgccgctttcccggagttcctgttcagcaagcagacaaattgccccaattacgtcgcttagcctgtagtgtgtcgcaacgggataataaaacagccacatttgacttcagcgcctgttctttagaatggcaaaacaccgtcgcccaggcgatcagtcagatcgacggcctgaaaacaacacagttaccatcaccagtaatggctgtactcacggcacttgaaatgaaatgcacaagatataaagtgcgtgaggatgttatggatcagatcgtccaggaaggcggtctggaatatgctactgatgtaataatacaccttcaacagattgatattgaatgggattatgcgaataatgtcattattattctgccgtctggcattgcacctagctacttggagcaatattccagatttgaatgacgcctacgtaaacatttatcactgacggaagagtctctctggcaaaaatgtgcacaaaaacttattgccgcaattccacatattccagaatggcggcaaccattaattgctttgttattacccgaaaaaccagaaattgcacatgaaattgcccagcgtctactggggcaaaaaaaattaccctcgcttgagtggttaaaaatagtggcgactgatgagcacattcttgcctcattagaaaaatatcacgaaccatatgccatttttgatgattactattgtggtgcgatatggtcagccaccgtattacaggagcaaggtgttgcagccctgccccgatttgctccctatgccgcaagtgactactgcgccgatgtgttgcgtcatatcaatcatccgttcgcattgacactgcttatacgtgtagccgggcaaactaaacgctgtcacgatcggatgacgaaagccattgctgcgttcccacatgcagcaatggcggcactgacggaacttcttgggcaaaaagaagagaacagttggcgcattatgctaatgacaatgcttatctcacaaccagcactggcagaacaggtcattccctggctctcgacacccgcagttgccgtactgaaatcatgccagcaacaactgacacagccctcaaaccatgccagcgccgatctactgccagccgtagtagtctcccctccctggctttcgaaaaagaaaaaatcgccgattccggtgctggatttagcgccattaggcattgagccaatctgttatctgacagaagaaatcagtaatcaacttttggcgaaatatatctggtattcaaaacacatcacggttagccatgaagaaagtactaccaacctgttggcaaggatgggttttcaacgacggatcgctggtacatatattaaagctcccgaagcggtagttgaggcatggctaaatgaagattattcaaccttactaagtgaatttaaggtgtttcattcacctaccgggcattattggcagttggggattttgacaacattgccgctggagaaagcagtaaaagcatggaatgcccttaccctatctccacataccgataccgaatactccatgttacattttggactcaaagggttacctgggttagtaaactcacttgcacgctatccacaagaagccttgcccatcacgaattacttcgcagcgagtgagctggctcctgccgtcgcccgtgccttcaacaaactgaaaacgctacgcgaaaacgcccgtagctggctgttgaaatacccggaacatgcccttaccggcctgctgcctgcggcgctcggcaaagccggtgaagcacaggataacgcccgcgctgccttgcgtatgcttaccgaaaacggtcatcagccattactgcaagaaatcgcccgacgttataaccagccggaagtaaccgatgcggtgaacgctctgcttgcgctcgatcccttagataatcacccgacaaaaatccccactcttccggccttttatcagccatcgctctggacgcgcccggtattaaaagcaaatgcccaatcactgccagatagcgccctcctccacctcggtgaaatgctccgcttccctcaggaagaggctctgtatccgggattattgcaggtgaaagacgtctgttccgccgactcactggcgggatttgcctgggatctgtttaccgcctggcagaccgctggcgcgccgtcgaaagagagttgggcgttcactgcgttaggcgttctcggtaacgatgacaccgcccgcaaactgacgccattaatacgcgcctggcctggtgaatcccagcataaacgcgccaccgttgggttggatattctcgctgctatcggtagtgatatcgcccttatgcagcttaacggcatcgcccagaaactgaaattcaaagcattacaggagcgggcaaaagaaaaaattgccgacattgccgagagccgcgaactcacggtggcggagcttgaagatcgggttagcaccggatctcggtctggatgataacggttcgctgctgctggattttggcccacggcagttcaccgtcagctttgatgaaaccttaaaaccgtttgtgcgtgatgtttccggcagccgcctgaaagacctgcccaaaccgaacaaaagcgatgatgaaacgcgggcgaacgatgcggttaaccgctacaaattgctgaaaaaagatgcgcgtaccatcgccgcccagcaggtagcaaggctggaatccgccatgtgcctgcgccgccgctggtcgctggaaaacttccagctcttcctggttgagcatccgctggttcgtcacttaacccgccgtctgatttggggcgtttatagcgccgaaaaccagctactggcttgctttcgcgtagcagaagataacagctccagcaccgctgacgatgatcttttcaccctgccggaaggcgatatctctatcggcactcctcacgttctggaaatatcaccaacggatgctgccgcctttggtcagctttttgccgactacgaactgctaccaccgttccgccagctcgaccgtaacagctacgccctgacagaagccgagcgcaatgccagtgaactgacccgctgggcaggcagaaaatgcccgagtggtcgggtcatggggctggcgaataaaggctggataaagggcgaaccacaggatggaggctggatcggatggatgatcaaacctttgggtcgctggtcgttaatcatggaaatcgatgaaggctttgcggtaggcatgtcgccagccgaactcagcgctgagcagctcttaagcaagctgtggctatgggaaggcaaagcagaaagatatggctgggggagtaattcaacacaggaagcgcagttctccgtaatcgatgccatcaccgccagcgagctaattaacgatattgaagccctgtttgaataaggaaagagcatggacaaggaattaccgtggctggcggataacgcccaactggaactgaaatataaaaaaggcaaaacgccgctcagtcatcgtcgctggccgggcgaaccagtgtccgttatcactggaagtctcatccagacattgggtgatgaattgctacaaaaagctgagaagaaaaaaaacattgtctggcgttatgagaattttagtctggagtggcagtccgccatcacgcaggccatcaacttgatcggcgaacacaaacccagtatcccggcccggacaatggcggcgctagcctgtatcgcgcaaaatgacagccaacagttgctcgacgaaatcgtccaacaagaggggctggaatatgcgactgaggtggtgattgcacgccagtttattgcgcggtgttatgagagtgatcctctggtagtgacattgcagtatcaggacgaggattatggctatggttatcgcagtgaaacctataacgaattcgatctccgactgcgtaagcatctctctctggcagaggaaagctgctggcagcgttgcgccgacaaactcattgccgcactaccaggaataaacaaagttcgccgcccttttattgcgctgatcctcccggaaaaaccagaaatagccaatgagttggtaggccttgaatgcccgcgaactcattttcattctaaggagtggttaaaagttgttgctaatgaccccacagcggtgagaaaactcgaacactactggagccaggatatatttagcgatcgagaagccagctacatgagccatgaaaaccacttcggctacgcggcctgcgccgcccttttgcgcgaacaaggactggcagccattccgcgcctcgcgatgtatgcccataaagaagattgcggcagtctgctggtacaaattaaccatccgcaagtcatccgcaccttgctactggtggctgataaaaacaaacccagcctgcaacgtgtagctaaataccataaaaacttcccccatgcgacgctcgccgcactggcagaactgctggcgttaacagaaccaccagcccgccctggttatccaatcatcgaagacaaaaagctgcctgcacagcaaaaagcacgcgatgaatactggcgtacgctgttacaaacgctgatggcaagccagccacaactggcagcagaagtgatgccgtggttaagtactcaaccccagagtgtgctgaagagttatttaagcgcaccgcccaaaccggttattgatggcaccgataacagcaatctgccagaaatcctcgttagtccaccgtggcgtagtaagaaaaaaatgacagctccacgtcttgatttggcaccgctcgaattaactccgcaagtttactggcaaccaggcgaacaagagaggcttgccgccactgagcctgcccgttatttcagcacggaatctcttgcgcaacgcatggaacaaaaaagtggacgagttgtattacaggaactgggttttggggatgatgtatggctgtttctgaattatatactccccggaaaactggatgctgcacgcaatagtctctttgttcagtggcattactaccaggggcgggttgaagagatcctgaatggctggaactccccggaagcacaattagcagaacaggcgctccgcagcggtcacatagaagcgttaattaacatatgggaaaatgacaactacagtcattatcgtccggaaaagagtgtctggaacctgtatttattggcacagttgccgcgtgagatggctttgaccttctggctgcgtatcaatgagaaaaagcatctgttcgcgggtgaggactattttctcagtatcctcggattggatgcgctaccaggtctgctgttggcttttagtcatcgtccaaaagaaacatttccgttaattttaaattttggcgcaacagaactggcgctgcctgttgcccacgtctggcgacgtttcgcggcgcagcgtgatctggctcgccagtggattttacaatggccggaacatacggctagtgcacttatccctcttgtctttaccaaacccagcgataatagcgaagccgcattacttgccctgcgtttactgtacgaacagggacatggcgaattgctacaaaccgtggcaaaccgctggcagcgtacagatgtatggtctgccctggagcagttgcttaaacagggtccaatggacatttacccggcacgcattccaaaagcccctgatttctggcatccgcaaatgtggtccaggccgcgccttatcactaataatcaaactgttaccaatgacgctctggaaattatcggcgaaatgctgcgctttacccaggggggacgtttttatagcgggctggaacaactgaaaacgttctgccagccacaaacgctggcagcttttgcctgggatctcttcactgcgtggcaacaagctggtgcccccgcaaaagacaactgggcatttctggcgttaagtctctttggtgacgaaagcacggcacgggatctgacgacacagatcctcgcctggccacaagaaggcaaatctgcccgtgctgtcagcggcctgaacatccttaccctgatgaataatgatatggcgctgatacagctgcatcatataagccaacgggctaaatcccgccccttacgtgataacgcggcggaatttcttcaggtggtcgcagaaaatcgcgggctaagccaggaagagctagcggacagattagtcccaaccctgggccttgatgatccgcaggcgttgagttttgattttggtccccggcagtttaccgttcgcttcgatgaaaatctcaacccggttatctttgatcagcaaaacgttcgccagaaaagcgttccccgtttgcgcgccgatgacgatcaactgaaagcgcccgaggcactggcccgactaaaagggctaaaaaaagatgctactcaggtgagcaaaaacctgctcccgcgtcttgaaacggccctacgtaccacccgacgctggagcctggcagattttcattctctgtttgttaatcatccctttacccgtctggttacccagcgattaatatggggggtttatccggcaaatgaaccgcgttgtttactcaaagcctttcgtgtggccgcagagggggagttctgcaatgcgcaagatgagccaattgacctgcctgcggacgctctgattggcattgcccacccgttagaaatgacagcagaaatgcgcagtgaatttgcacagctttttgccgattacgaaattatgccgccttttcgccagttgagccgccgcacggtgctgctcacacctgacgagagtaccagtaacagcctgactcgctgggaaggtaaatccgctaccgttgggcaacttatgggaatgcgatacaaaggctgggagagtggctatgaggacgcatttgtctataacctgggtgagtaccggctggtccttaagtttagtcccggttttaaccactacaatgttgatagcaaagcgctaatgagcttccgttctcttcgagtgtaccgtgacaataaatccgtcacttttgccgaacttgatgtgtttgatttgagtgaggcgttaagcgcacctgacgtcattttccattaaaacacagcgggcagtgatgcaactgcccgttatcaacacgacttaccagcggggaaagcgatgatcgtgcaaaaagagctggttgctatttacgattatgaggtccctgtacctgaagatccgttttccttcagacttgagatccataaatgctctgaattatttacaggttccgtctatcgactggagcgattccggctacgtccaacatttcatcaacgtgatcgagaagatgctgacccgctaataaatgatgcgttgatttatataagagatgagtgtattgatgagcggaaattacgaggtgaaagtcctgaaactgtaatagcaatttttaatcgtgaactacagaatatattcaaccaagaaatagaataatatactctaaataattcaaattggtccgatccggcgcaacgtcccaatggcctggattataaatctcattatcttaattgcaacggggtccagccgtggttataattcgttcgttggaacacgatgttgcacaggctgtggtgttaggcctgaaaatagtaaataaaagaacctgcctcaccagcaggtttttttatttactgtgatctgctttccagatatttttcgctcaaacaactaatgcgccaaacatttattgcgcgtaaaatatcgtttatttcattaatacatttcagggatgaatatatgagtccgcagaataatcatctgcagcgtccgcctgctgctgtgttatacgccgatgaactggcaaaattaaaacaaaatgataacgcaccttgcccgcccggttggcagttaagtttgcctgcggcccgtgcttttatccttggcgacgaagcgcaaaatatcagccgtaaagtggtgattagcccctccgctgtcgaacgtatgttagtcactcttgctaccggccgcggtttgatgttggtgggggaaccgggtaccgcaaaatctcttctttctgaattactggcaaccgctattagcggcgatgccgggttaaccatccagggcggggcatctaccaccgaagatcaaatcaagtatggctggaactacgccctgcttatcaatcatggtccgagtacggaagcgctggtccctgccccgctttatcagggaatgcgcgacggcaaaatcgtccgtttcgaagagataacgcgtacaccgctggaagtgcaggactgtctgttaggtatgctttctgacagggtgatgacggggccggaactcactggtgaagccagtcagctctatgcgcgagaaggctttaatattattgccactgccaatacccgcgatcgcggcgtcaatgaaatgagtgctgcgctaaagcgtcgcttcgattttgaaacggtttttccgattatggatttcgcccaggagttggaactggtcgccagtgctagcgcgcgtttgctggcccatagcggtattccgcataaagtgcctgacgcggtactggaattactggtccgcaccttccgcgatctgcgtgccaacggcgaaaagaaaacgagtatggatacactgacagcgattatgtccaccgctgaagccgtgaacgtggcccatgctgtgggcgtccgcgcctggtttttagcgaatcgcgcgggggagcctgccgacctggtggaatgtattgccggaaccatcgtcaaagataacgaagaagatcgcgcgcgtctgcgccgttacttcgaacagcgtgtcgccacacataaagaagctcactggcaggcttattatcaagcccgccaccgcctgccgtgaggaaagatgcatgagcgagccgttaattgtcggcatccggcatcatagtccggcctgcgcccggctggtgaaaagcttaatcgaaagccagcggccacgatacgtgttgattgaaggcccggctgattttaatgaccgggtagacgaactgtttttagcccaccagcttccggtagctatttacagttattgccagtatcaggacggtgcagcccccgggcgtggtgcctggacgccatttgctgaatttagcccggagtggcaggcgctacaagccgcacgtcgcattcaggcacaaacttacttcatcgatttgccttgctgggcgcagagtgaagaagaggacgatagccctgatacgcaagatgaaagccaggccttactgctgcgtgccacccgcatggataacagcgataccctgtgggatcacttgttcgaagatgaaagccagcaaactgcattaccctctgcgctggcgcactattttgcccaactgcggggcgacgcctccggcgatgcgctcaatcgtcagcgcgaagcctttatggcccgctggattggatgggcgatgcagcaaaataatggcgacgtgttagttgtctgcggtggctggcacgctccggcactggcaaagatgtggcgcgaatgccctcagaaaattaacaagccagaattgcccagcctggcagatgccgttacaggttgttatctcacaccctacagtgaaaagcgccttgatgtgctggcaggataccttagtggaatgcctgccccggtatggcaaaactggtgctggcagtggggcttgcagaaggccggtgaacaactgctaaaaactatccttacccgtttgcgccagcacaaattgcccgcttctaccgcggatatggctgccgctcatctgcatgcgatggcgctggcacagttgcgcggtcatacactaccgttacgcactgactggctggatgccatagcaggcagcctgattaaagaagccctgaacgcgccgttgccgtggagctatcgcggcgttattcatcccgataccgatccgattctgctaacgttgatagacacattagcgggtgacggattcggtaaacttgccccttctacgccacaaccgcctctgccaaaagatgtcacctgcgaactggaacgtaccgcaatctcccttccggcggagcttaccttaaatcgctttacccccgatgggctggcgcaaagtcaggtgttacatcggctggcaatactggagatccctgggattgtacgccagcagggaagtacactgacacttgcaggcaacggtgaagaacgctggaaattaacccgcccgcttagccagcatgcggcattgattgaggccgcctgttttggtgccacactccaggaagccgcacgcaataaattagaagccgatatgctggacgcgggcggaatcggcagtatcaccacatgtcttagccaggcggcgttagcgggtctggcgtccttcagtcaacaattactggagcaactcacactattaatcgcccaggaaaatcaatttgccgaaatgggccaggcgctggaagtgctttatgccttatggcggctggatgaaattagcggtatgcaaggcgcgcagatattacaaacgacgttatgcgcgactatcgatcgcacgctgtggctgtgtgaatctaacggcagaccggatgaaaaggagtttcacgctcacctgcatagctggcaagcgctttgccatattctgcgcgatctacatagcggcgttaatttacccggcgtttctctttctgcggcggtagccttactggagcgacgcagtcaggcaattcatgccccggcgctggatcgcggcgcggctcttggcgcactaatgcgtctggaacatcccaacgccagtgccgaagcggcgctgacgatgctggcgcagttatccccggcacaatctggtgaggcgctgcacggtttgctggcgctggcccgccatcaactggcctgtcagccggcatttatcgccggtttcagcagtcatttaaatcaactgagtgaagccgattttattaacgccctgcccgatttacgcgcggcgatggcctggctaccaccacgagaacgcgggacgctggcgcatcaggtgcttgagcattatcaactggcgcaacttcccgttagcgcgctgcaaatgccgttgcattgtccaccacaggccattgcacatcatcaacaactcgaacagcaggcactggcaagcctgcaaaactggggagttttccatgtctgaactgaacgatcttctgaccacccgtgagctacaacgctggcgattaattcttggcgaagcggcagaaacgacgctttgtgggctggatgacaacgcccggcagatagaccacgcgctggagtggctgtatgggcgcgatcctgaacggctccagcgtggtgaacgttccggtggattaggtggcagtaatctcaccacccctgagtggatcaacagtattcacacgctgtttccgcagcaggtgattgagcggctggaaagcgatgccgtgctgcgctacggcattgaagatgtggtgacgaatctcgacgtgctggaacgtatgcagccttctgaaagcctgctacgcgctgttttgcacaccaaacatctgatgaaccccgaagtactggctgccgcccgccggatagtgtgccaggttgttgaagaaattatggctcgactggcaaaggaagttcgtcaggctttttctggtgtccgcgatcgccgtcgccgtagttttattccactggcgcgaaactttgatttcaaaagtactctgcgcgccaacctgcaacactggcacccgcaacacggcaagttgtatatcgaatccccccgctttaacagccgcattaaacgccaaagcgaacaatggcaactggtcttactggttgatcaaagcggaagcatggtcgatagcgtgatccactctgcggtgatggcggcctgtttgtggcagttacccggcattcgtacccatctggtggcgtttgacacaagcgtcgttgatctcacggcagacgttgccgatccggtagagttattaatgaaagtacagttgggcggcgggaccaatatcgccagtgccgtggagtatggtcggcaacttattgaacaaccagcgaaaagcgtcattatcctcgtgagcgatttttacgaagggggtagtagtagtttactgacgcatcaggtgaaaaagtgtgtccagagcggcatcaaagtgctgggactggcagcgctcgatagcaccgcaacaccttgctatgaccgcgatacggcccaggcgctggttaatgtcggcgcacaaatagccgccatgacgccgggcgagctggcaagttggcttgcggagaatcttcagagttgacataacttgcggagaatcttcagtcatgaatagtctacgtccggaattattagaactgacaccgcaggccctgacggcgttaagcaatgccggttttgttaagcgcagtcttaaggaactggaaaatggcaacgtcccggagatcagccatgagaacgacgctttaatcgccaccttcagtgacggtgtccgtacccagctggcgaacggccaggcactgaaagaggctcagtgcagttgcggggccaacggtatgtgccgtcatcgcgtgatgctggtgttaagttatcaacgactttgtgccaccactcagtctacggaaaaagaagaagagtgggatccggcaatctggctggaagaactggctacccttcccgatgctacccgcaaacgcgcacaggcgctggtcgctaaaggcatcaccattgagttgttctgtgcgccgggtgaaattccctctgcccgcttaccgatgagcgatgtgcgtttttattcccgcagcagtattcgtttcgcccgttgtgattgtattgaaggcacactttgcgaacatgtcgtactggcggtacaggccttcgtcgaggccaaagcgcagcaagcagaatttaaccatttaatctggcagatgcgcagcgaacacgtcacaagttctgacgatccgtttgccagcgaagaaggcaacgcgtgtcgtcaatatgttcagcaattaagccagacattatggcttggcggcatcagccagccgctcatccattacgaggcagcattcaaccgcgcattgcaggcggcagagacctgcaactggcgctgggtgagtgaaagcctacggcaactgcgcgccagcgttgatgccttccacgcccgcgccagccactataatgccggagaatgcttacatcagcttgcggcattaaacagtcgattaaattgcgcacaagagatggcccggcgcgacagtattggtgaagttcctcctgtgccgtggcgcacggtcgttggctctggcattgccggagaagcaaagcttgatcatctgcggctggtgtctttaggtatgcgttgctggcaggatattgagcattatggtttacgcatctggtttaccgatcccgacaccggcagtattttgcaccttagccgcagttggccgcgaagtgaacaggaaaacagtccggcagctacgcgtcggctgtttagttttcaggctggcgcactggcgggcgggcaaattgttagtcaagcagcaaaacgcagtgccgatggcgagctgctgttagctacccgcaaccgcttaagcagcgttgtgccgctgagccctgatgcctggcaaatgttgagcgcgccgttacgccagccgggcattgtggctttgcgggaatatttacgccagcgtccccccgcctgcatacggcctcttaatcaggtcgataacttatttattctgccggtcgctgagtgtattagcctcggttgggacagcagccgccagacgctggatgcgcaggtcattagcggcgaaggggaagataatgtgctgacgttaagtttaccagccagtgccagcgcaccttatgccgttgaacgcatggcggcgcttttgcaacaaacagacgaccccgtgtgtctggtttctggctttgtcagttttgttgaagggcaattgacactggaaccacgggtgatgatgacaaaaacccgtgcctgggcgctggacgcagaaactacgcctgtggcaccgctaccttctgccagcgttttgcctgtgccgtctactgctcatcagttgctgatacgctgccaggcgttacttattcaactgctccataacggctggcgctatcaggaacagagtgctattggtcaggcataattgctggcgaatgacctcaccgcggtgggtttttatcggctggcacatgtgttgggacaatttcgtaatacagaaagcgaggcacgggtagaagcaatgaataacggtgttttgctttgcgaacaattattccccatgcttcagcaacaaggatgaaatagtgctttttactaagagttctactccagttccggactgctcacgccacggtattaggcatatcctatatagcccctggtgagagtcaccagttccttgattaaataaaatggagttttacatgaaggctttcaataagctgttttccctcgttgttgcatctgttctggttttctctcttgctggctgcggtgacaaagaagaaagcaagaaattcagcgccaatctgaacggcactgaaattgccattacctatgtctacaaaggtgacaaggtgcttaagcaatcttctgaaaccaaaattcaatttgcctccattggtgcaaccaccaaagaagatgctgccaagacacttgagccgttaagcgccaaatacaaaaacatcgcgggtgttgaagaaaaattaacctataccgatacctacgcgcaggaaaacgtgactatcgatatggaaaaagtggattttaaagccctgcagggtattagtggaatcaacgtttctgctgaagatgccaaaaaaggtatcactatggcgcaaatggaactggtgatgaaagccgctggttttaaagaagtgaaataatcggttggcggtcatgctctaaacatgaccgccaattttttagccttttttcacatgctggcgcgctgccagtccacgcagaaaataacgtaaaaattgatcgccgcattcgcggaagtttttatgatccggtgcgcgcatcatcgctgtaatttccggcatgctaacgcggaactgctgttcggtgaggatagccagaatgtcatcggttttcaggctaaacgcgatgcgtaattttttcagcacgatgttgttattaatgcgacgttccggctccagtgccggagcagactcatccttgccgcgtttttcataaatcaggccattgaggaaactgctcaaaacaatgtccggacaacgctgaaaaccctcttcgtcttctttacgtagccagacggcgatctgttccgcggtggcttcgacattacccagcgccagaatacgcaccaggtcattattattggctttcaaaatgtagcgcacgctgcgcagaatatcgttacttagcatgaggccttcaggtgttgatgaggcaaaaagccattttagcagtcttttacaggccaatcgcctcttttaagcttttcagataacggcggctgaccggcacggttaagccattacgcaaaatcaactcggcctggccgttatcttccagacgaatctcctgtaaatgcgcgaggttaaccagatactgacgatggcagcgcagtagtggtgtacgactttccagggtacgtaatgtcaattcggtaaagccctctttcccttcgtggctggtaacgtagacaccgctcatccgactgctgacaaatgccacatctttcatttgcagcaaataaatccgactatgccccgtacaagggataaatttcagcgcctgttgattttccggtaacaggctaacatcctgcttgctgcgctcctgacgcaatcgcgccagcgttttctccagtcgcgcttcatcaattggcttcagcagataatcaaaggcatgttcttcaaaggctttaattgcgtattcgtcaaacgcagtgagaaaaacaatatacgggcgatgttccgggtcaagcatccccaccatttccagaccactgatgcgcggcatctggatatcgagaaacagcacatccgggcgcagtttatgcaccgcgccgatcccttccacggcgttactacactctccaacgatttcaatatcgctctgctcctgcaaaaatacacgcaggttctcccgtgctaacggttcatcatcgacaattaagactttaatcatgcctcgtccctccatggtagtcgtaacgttattcgggtgtaactatcaggctcacaggcgacgcttattccatagtcatcgccaaaccgttcacgtaaacgcttatccaccagattcatccccagcccactggcattggttaccggttgatacaaaccggcattgtcttcgatctccagcatcaaatgttgcccctcacgtcgggcgctgattgccactcgccctgtatccagcagttgacttgtcccatgtttaatggcgttttccactatcggttgcagggtaaacgcgggcaattgctgctgggataattcttgcggaatagcaatgttgacctgcaaccggctctggaagcgcgccttttcaatttgcagataagcattcacatgttcaatttcgtcggcgagagtaacaaactcgctaggccgctttaagtttttgcggaaaaaagtggaaagatactgcaccagctggctggcctgttcgctgtcgcggcggatcaccgctttaatggtgttaagcgcattaaacaaaaaatggggattcacctgggcgtgaagcagtttgatctcactctgggtgagcatcgctttttgccgctcatattgcccggcaaggatctgcgcgctaagcaattgcgcaatcccctcacccaacgtgcggttgatgctactgaataaacggtttttggcttcatacaatttgatggtgcccatcacccgctgattttcaccacgcaacggaattaccagcgtgctccccagtttgcattgcggatgcaaagagcaacggtaaggtacttcgttgccatcagcgtagaccacttcaccggtttcaatcgcttttaaagtataagtactagaaatcggtttgccgggtaaatggtggtcgtcaccaattccggtaaaggccagcaatttctctcgatcggtaatcgcgactgcaccaatatccagttcctgatacagcacctgagccactttcatgctgttcacttcgttaaacccctggcgcaaaatgccttccgtgctggctgccactttcagcgcagtggcagaaaaagcgctagtgtatttttcaaacatcgcgcgtttatcgagcaatatacgcataaacagcgccgcgccgacggtattggtgaccatcattggcgcagcaatattactcaccagacgcaccgcatcttcataaggtcgggcgatcgcaaggatgatcagcatttgcaccatttcagcgacgaacgtgacggcaccggcggtaatggggttaaagactttatcagtgcgcccgcggcggatcaggatgctgtgtaccaggccaccgagtaatccttcaacgatggtgctgatcatgcaacttaacgcggtcatgccccccatgctatatcgatgtaagccgccggtcagcccaaccagcccaccgacgaccggaccgccgagtaagccgcccattaccgcgcctatcgcacgggtattggcaatagaatcgtcaatgtgcaacccaaaccaggtgcccatgatgcagaagatggaaaagacgatgtagcagagaaatttatgcggcagacgaaccgtgacctgcattaacggtatgaataatggcgttttactcattaaccatgcaatgactaaaaaaacgcacatctgctgaagcagcagcaacaccagattaaaatcgtacatacccgcaaaccacacttccctttaaaacgcgtaacatacattgcctgcgtttaactttctttgaactcttgcagaaaaatgagaattcgtgagtacgatcactcaaaatcgcctggcaaaaataaaatcaccctatagatgcacaaaaaacgggcaaaactacctggttcgcaaaactgcgtctaaagttaaaccgggacctcgcgagcaagggtgagacgatggcgctttacacaattggtgaagtggcgttgctttgtgatattaatcctgtcacgttacgcgcgtggcagaggcgttacggattgctgaaaccgcaacggacagacggcggtcatcggctgttcaacgatgccgatattgaccggatccgcgagatcaaacgctggatcgacaacggcgtgcaggtcagcaaagttaaaatgctgctcagtaatgaaaatgttgatgtgcagaacggctggcgcgatcagcaagaaacattactgacttacctgcaaagcggcaatctacatagcctgcgaacgtggatcaaagagcgcggtcaggattaccccgcccagacactcaccacacatctgtttattcctctgcgccgacggcttcagtgccaacaaccgactctccaggcgctgctggcgatcctcgacggcgtactgatcaactacatcgccatttgtctggctagcgcacgtaaaaaacagggtaaagatgcgctggtggttggctggaatattcaggataccacccgtctgtggctggagggctggattgccagtcaacaaggatggcgcattgatgtcctcgcccacagcctcaatcaactacgccctgaactattcgaaggccgtacattgctggtgtggtgcggtgaaaatcgaacctccgcccaacagcagcaactcaccagttggcaagaacaaggccatgatattttcccactcggcatttaatgattcgttaacaaatgcgctttactgtacaatcctttcgttaacataaggagtgcattatgcgcatagctaaaattggggtcatcgccctgttcctgtttatggcgttaggcggaattggtggcgtcatgctcgcaggttatacctttattttgcgtgctggctaagcgcctgcaccagcctttcaaacaggcggtctgcgatgatcgccgccagtgccaccagtaacgccccctggatcacatacgcggtattaaatccgctaagcccgatgatgatgggcgtacccagcgtgctggcccctaccgtactggcgatcgtcgccgtaccaatgttgataatcacgctagttcgcacgcccgccagaatcaccggagccgccagcggtagctcgaccttacgcactcgctgaccacgactcattcccatacctttcgcaacttctgtcacgctggcatcaatcgctcccagcccggcaagtgtcgcctgcaggacgggcagcacaccgtaaaggatcaaggcgataatcgctggttgcagaccaaagccgatcaccggaacggcgatcgccagcactgcgacgggcggaaaagtctgtccaacggcggcaatagtttccaccagtgggcgaaattccgcgccccacgggcgagtgacagcaattccggcaccagtgccaatgatcaccgcaaacaaactgctaattcccaccagccagaaatgagccagtgccagagctgcaaaactttcttgctgataaacgggtcgtggcagttgtgggaacaaggcagcaaacagcggctggctgtaaggcagccagaaaatcagcgccacaaacagagcaatgagccagaacagcggatcgcgcaacatcttcatacgcttacgcctccaccagcagatcctgaaaatgcagcgtgccgcaaggctggccctgcatgttcaccaccggcagcacctcgcatccccgcgcaacaaacagagagagcgcatcgcgtagcgtcatctcttctgccagtgcctcaccatctgctcgttcttcgcgacgcacgtaatccgccacactacgtaagctaagcaggcgcacacccagttcactacgtccaaaaaactggcggacaaaatcattcgccggacgagtcagcatcgtcagcggattgccctgctgcactacttcaccgtgatccatcaataccagatgttctgccagccgtagcgcctcatcaatatcatgagtgaccagcacaatggtacgccccagcaaacggtgaatgcgcgtcatctcttgttgcaacgcgccgcgcgttaccgggtccagtgcgccaaaaggttcatccattagtaagacttgcggatcggcagccagtgcacgcgccactcccacacgttgctgctgaccaccggaaagctgatgcggataacgctcacgcaaattactctccagccccagtagcgccattaattcgtcgatacgatcgtcaatccgcgcccggctccatttttgtaattgcggcacggtagcgatgttttgcgccacgctccagtgggggaacaggccaatagattgaatggcatagcccatccggcggcgcaactccagtactggcaggctgcgaatttcttctccggcaaagcggatctctccgctgtcatgctccaccaggcggttaatcattttcagggtggtggatttgccggagccagatgtgccaatcagcacgctaaaactcccttcctgaaaattgagattgagatcgttaacggctttttgtgcgccgaacagtttgctgacatggctaaattcaatcattacgtttcaccttcagcagtgcgataagcaaatcgaacagcgcgtcggtaagcaccgccagaacaattaccgggatcacccccagcaacactaaatcaatggcgctgcttagcagcccctggaaaaccagcgcaccaaaaccgcctgcgccgattaacgccgcaatcaccgccatacctacagtttgcaccatcaccacccgcaggctgcgcagaaataccggtaacgccagcggtaactgaacatgcaggaaacgctgcgccccgctcatccccatcgctctggcgctttccagcacatcgcgcgggatctggttcaaaccgactaccacgccgcgcaccagcggcagcaaggcatagagcaccagcgcaatcagtgcgggtgtcattccggttcctgctatgccgagcgtccccagccacggaaaggccgtaaccagcgcggcaagcggcgcaatcaacaggccaaagagcgccacgctaggcacggtctgaatcacattgagcagagaaaaaattgccccctgccgagcagtggaaaagtagcaccagatgcccaacggcacaccaatcactaacgcaggcagcaccgcaccaaacagcaacgtcagatgttgtgccagcgcgtcgtcaaacacatcctgacggttggcgtattctttcattagactgagatcgttaagcgtgccggagtacagcaaccacagcggaataatggcaatctgcatatgcaacaaccagcgccacagcggatgcgtggagattcggcggatggcatcgctacaggccagcaatgccagcgccgcagccagccagaaaccactgccgaggctggtacgcgccagcgcactgccattttgcgccagttgggtcgccgcctttccagctccccacaccagcaatacgaagacgaattgcgccagaatgagtgcacaaatgctgccttttttaccgggaataaaacaggccgtcagccaggcgcaaccaacgcccaccagcatccagatcgtttgcggccacagctgccagagatgacgcccctcaccgctaactaaacgattaggcgcgtaactgataaacggcagcgccgctgcgattgccgtcagcaacagcagcagcgccagaacaggattaatacggaaataagtcacgggaaattacttcgtccaccctttttgtttcaggtagtcggcagccacttttttggcatccagtccttccacagcaatgctggcattcagttgctgcaatgtttttgcatcgaggctggcgaagactggctgtagccactgtgccatttgcggatactccctcaacacgctctcacgcaccactggtgcaggcgcgtagataggttgcacaccttgcggatcgcttaaggtttgcagccccagcgccgctaccgggccgtcagtgccgtaagccattgcagcattaacgccagaggtttgctgggcagcggctttgatcgtcaccgccgtgtcgccaccagccagactcagcaactgatcctgaccgagcttaaagccataggctttttcaaacgcgggtaacgcatcggcgcgttcgataaactctgcgctggctgccagtttgaaggtgccgccctcttgcagataacgactcaggtcggcaaggctagtgagtttatttttctctgccacatcctgacgcacggcgatagtccaggtgttatttgcaggcgcgggcgtcagccagattaacttgttgtgctcgctatcgagctttttgactttctcgtaaccttgctgcgcgtttttccacgctgcatcgttttcatctttaaagaagaaagcgccattgccggtatattccggatagatatccagttcaccggaagtaatcgccccgcgcaccacaggagtcgttccgagttgcactttattcaccgtcggtacgccgtggctttccagcacctgcaaaatgatattgccgagtagcgcaccttcggtatcgattttactaccgactttaacgggggaagccgcctgtagcggcaggctcacggctgccaacataaccagactacctgcccagagctttaagagtggcatgatgctttcctcattcttttactgttgttttcagcgaattaagagaaaagcatagttgataatggcggggttagcttgagcggaaggattcagttgcagaatcagataaatacttaagaggcatattcggtccggcgtttcctgccggatgcggcgcgagcgccttatccggcctacaaagggcgcaaacgtcgcgcccttactaaagcattacagcaactcaaactcgcctttcttaacgcgtgcggaatcagtgccgataaagacattgaacttgccaggctcggcgtcatatttcatctgttgattccagaacttcagcgcctcaatatcgatcgggaagctgacagtctgagtttcgcccggtttcagggtgattttctcaaagcctttcagctgtttcacagggcgactcatggaagccgtcacatcctgcaagtacatctgcactaccgtggcaccctcgcgcttaccggtgttcgtcacctgcacgctggcagtcactttgccgtcacgcttcatggtcggcgcagaaagtttcacatcagagacggtgaaagtggtgtagctcagcccatagccgaacggatacaacgccccgttagcttcatcaaaataacggctagtgtatttgttcggcttgtcggcattatacgggcgaccggtattcagatggctgtagtacaccgggatctgcccgacagaacgcgggaaggacattggcagcttgccggacgggttgtaatcgccaaacaatacatcggcaattgcattaccgccttcagtccccgcaaaccaggtttccagaatcgcatcagcctgctgatcttctttcaccagcgccagcggacgcccgttcatcagcaccagcaccagcggtttaccggtggctttcagcgccgcaatcaagtcacgttggctttgcggaatagtgatatcggtccggctggaggcttcgtgcgccatcccctgtgcttcaccgactacagccaccaccacatcagattgtttcgccgtctgcaccgcttcatcaatcatctcttgcgggctacgcggatcgactttgaccgcttcttcatactgattcaggaaatcgataatgcctttgtcactggtaacgttcgcccctttggcatacagcactttaccgttttcaccgacggcatttttaatcccggtcagtacggtcacggattgatcggcaacaccggctgcggaccagctgcccatcacgtcacgtttactgtccgccagtggcccaaccaccgcaatggtggcgctttttttcagcggtaacgtttcgagacggtttttcagcaacaccaagctttcgcgcgccacttcacgcgcttctttacggtgcaggcggctttcggcattggtatccaccgggtcagactctttcggccccaaatggctgtatgggtcgttaaacaaccccatatcatatttaacgttcagtacatggcgggcagcatcgtccagctctgccatcgtcactttgccggatttaatcaacccaggcagatacttgctgtagtactcgtcgctcatgctcatgttgattccggatttcagcgccacgcgcaccgcatcttccgggtctgccgccgtgccatgtttaatcagctctttgattgcaccgtgatcggaaacggtgatgcctttaaagccccactggtcgcgcagaacatctttcagcagccaggaatcggaggtggctggcgtgccgttcaggctgttcagcgccaccatcaccgcgccgctgcctgcgtccagccccgctttgtacggcggcatataatcattaaacaggcgctgcggactcatatcgacggtgttgtactctttaccgccttctaccgcgccgtatgcggcaaagtgtttgacgctggtcatcacgctgtagcgatctgccgggcttttaccctgcatcgcttccaccatggttttacccattgtactggtgagatacgtatcttcgccaaaaccttcggaagcacgtccccagcgcggatcgcggctgacatcgaccatcggtgcccaggtcatattcaggccatcatctgccgcttcataagcagagacacgtccgaccgttttcactgcatcgaggttaaaagagctggccagaccgaggctaatcgggaacaccgtgcgctgaccgtgcagcacgtcgtaagcaaagaaaagaggaattttcaggcggcttaattccatcacctgatcctgcatggcgcggatatcctgacgggttacggtgttgaaaatcgccccaacctgaccgtctttgatcatctcgcggatcgcctctttcgggttatccgggccgacgctgattaagcgcagctgaccaattttctcatcaactgtcattttcttaagcagttcggtgacgaacgcatcccgcgcttcgggcgttaatggatggttgccgaataaatcatccgccagtgctggctgcagggccagactcaccgcgattcctacactacatagccatttcatatggatttttcttcctttgttgcccgacgtggcagcgaaaatggtgcaaaaaccgtagtttgccataagcatgatggagagagaaaaagaatgctcagtttattgtctgaattttcaaaatattcactcgctgaattgttatacaaggcgctattctagtttgtgatattttttcgccaccacaaggagtggaaaatgtcttccatgacaacaactgataataaagcctttttgaatgaacttgctcgtctggtgggttctagtcacctgctcaccgatcccgcaaaaacggcccgctatcgcaagggcttccgttctggtcagggcgacgcgctggctgtcgttttccctggcagtctactagaattgtggcgggtgctgaaagcctgcgtcaccgccgacaaaattattctgatgcaggccgccaatacaggcctgaccgaaggaagcacgccaaacggtaacgattatgatcgcgatgtcgttatcatcagcaccctgcgtctcgacaagctgcacgttcttggcaagggcgaacaggtgctggcctatccgggcaccacgctctatagcctggaaaaagccctcaaaccgctgggacgcgaaccgcacagtgtgattggaagtagctgtataggcgcaagcgtcatcggcggtatttgtaacaactccggcggcagcctggtgcaacgtggcccggcgtataccgaaatgagcttattcgcgcgtataaatgaagacggcaaactgacgctggtgaaccatctggggattgatctgggcgaaacgccggagcagatccttagcaagctggatgatgatcgcatcaaagatgacgatgtgcgtcacgatggtcgtcacgcccacgattatgactatgtccaccgcgttcgtgatattgaagccgacacgcccgcacgttataacgccgatcctgatcggttatttgaatcttctggttgcgccgggaagctggcggtctttgcagtacgtcttgataccttcgaagcggaaaaaaatcagcaggtgttttatatcggcaccaaccagccggaagtgctgaccgaaatccgccgtcatattctggctaacttcgaaaatctgccggttgccggggaatatatgcaccgggatatctacgatattgcggaaaaatacggcaaagacaccttcctgatgattgataagttaggcaccgacaagatgccgttcttctttaatctcaagggacgcaccgatgcgatgctggagaaagtgaaattcttccgtccgcattttactgaccgtgcgatgcaaaaattcggtcacctgttccccagccatttaccgccgcgcatgaaaaactggcgcgataaatacgagcatcatctgctgttaaaaatggcgggcgatggcgtgggcgaagccaaaagctggctggtggattatttcaaacaggccgaaggcgatttctttgtctgtacgccggaggaaggcagcaaagcgtttttacaccgtttcgccgctgcgggcgcagcaattcgttatcaggcggtgcattccgatgaagtcgaagacattctggcgttggatatcgctctgcggcgtaacgacaccgagtggtatgagcatttaccgccggagatcgacagccagctggtgcacaagctctattacggccattttatgtgctatgtcttccatcaggattacatagtgaaaaaaggcgtggatgtgcatgcgttaaaagaacagatgctggaactgctacagcagcgcggcgcgcagtaccctgccgagcataacgtcggtcatttgtataaagcaccggagacgttgcagaagttctatcgcgagaacgatccgaccaacagcatgaatccggggatcggtaaaaccagtaaacggaaaaactggcaggaagtggagtaaaaattacggatggcagagtatcgccatccgaattcacttaatcgttctgtgccgtctgccccgccgccgccatttgggcggctttttgttttttatagctcaacgctgctgccggcacaggcatcactttaccggtttcaatccaggtacgcaggcggctggcatcggcaaaatgggtatatttgccaaacgcgtccatcactaccagcgccaccggtttattattgataaccgtacgcatcaccagacaatggcccgccgcattggtaaagccggttttggttaactgaatattccagttatcgcgatacaccagatgattagtattgcggaacggcagcgtatacgtcggattagagaaggttgccatatcttcccgggtagtacttaactgcccgatcaacggatattgtttgctggcaatgagcagtttggttaagtcacgggcagtactaacgttatgcacgctcaatccggtaggttcaacaaagcgcgtgttgttcattccgaggcttttcgctttcgcattcattgccttaataaaggctttgtaaccaccgggataatggtgcgcaaggcttgccgccgcgcggttttcactagacatcagcgccagcaacagcatatctttacggctgatttcgctattcagtcgtacgcggctatagacccctttcatctccggcgtctggctgatatccacttttagtttttcatccagcggcagtcgtgcatccagcacaaccatcgcggtcattaatttgctgatagacgcaatcggacgcaccagatccgggtggttgctatagatcactttgttggtattcagatcaacaatcatcgcgctaccggaggcaatttccggttgactagcggtggtagcggctgccgttttcgcaacggcctgcggtgcaaaaggcacagccagcatcagggccaggctaaataaagaaactcgaaatttcggcatgatgagcattcagatagtggttcacgcgcacgggttgcgcaccgccggagtaaggatttactgaggctagcgacgccatcataacgagcaaaaagtgcgatcgtcaaaggagaatcgtgaggaaatgctgcattgctgacatttacgccagcaatgcaacgtcaaagaactttttagaacaaacgataaccgtagccccatagtataacggttagggcgagcagcacttccagtaccagcacgccaatcgccagcgtgctactagagaagctaaggccttcctctttgttgatattcaggaagctcggaataccaaggtaaagcaggtagccggtgtaaaacagcgccaccgtgccgaccagcgcacacaaccagaccagtggataaagcgccaccagaccgcttaaaaacagcggagttgcaacgtagcccgcgaagaccatgcagtgcgcaagactcggacgctgcggataattacgcgccatccaccagatgacccgccccatcaccgcgaccccagccagcataacgccgtaaaacaagacagccagcgccagtccggtaaaccaggataacttcaggatagtgccatcgccaaaattccagccaatctgtgtagtgccaatgaaggcgcaaatcaccggaatcgccgccatcagcaaaacgtggtgggtgtaatggtgagaaatcgtttcgttttcgcgattaatcacctgcatttcacgatcgggatgggaaaacagtccccagacatggctcataccgcccccttgttgtgagttcatgaacctgacagttcaagtataagtcagcttgtgattattttttgttcgcccatgtaattttcactgtctgatgaacgtcctttttcagcgtgaatgattcacagggtgtatgcttactggcaaccaaagggagacagactggcctatggatctcaatacacttatcagtcaatatggttatgccgcgctggtgatcggtagcctggcggaaggtgaaaccgtgactttgctgggaggcgttgcggcgcatcaggggctattaaagttcccgctggtggtactttctgtggcgcttggcggcatgattggcgaccaggtgctctatctgtgcgggcggcggtttggcggcaagctgttacgccgtttcagcaaacatcaggataaaattgagcgggcgcagaaacttatccaacgccatccgtatctgtttgtcattggtacgcgctttatgtatggctttcgggtgattggcccgacgctgattggtgccagccagctgccgccgaaaatctttctgccgctgaatattctcggcgcatttgcctgggcgttgatttttaccactattggttacgctggtggtcaggtgattgcgccgtggttgcacaatctcgaccagcatttgaagcactgggtctggttgattctggtcgtggttctggtggtgggcgtgcgctggtggctgaaacgacgcgggaagaaaaagccggatcatcaggcgtaaaaccattgccctggataaggcgttcgcgccgcatccgacatccggagtaccatgcctgatacgacgcttgtgcgtcttttcatgccgaccaaaatattacccaatgaaatatccacgcacctcactgcgttattctgggttgaactgtggattcgccaacataaagccgccatccactatcaagctctgcccggtggtgtaatttgcgccctcgctacaaagccacaccaccaggctggcaatctcatgcgttgcgccaaaacgccgcaagggaatgctaggctccgcgtcgggcttcacgtcgctgtcatccatgccattcattggcgtggcgatcgccccaggcgcgactgcgttcaccaaaatcttatgcctgaccagctccagcgccatcgctttggttaacccaccgagcgcatgtttagcggctgtgtaggcgctggcatccggcagcggcgtatgttcatgtacgctcgtaatgttgatgatgcgaccgccctgcccttgtttcaccatctgacgagccgcaatttggctgcataagaatgcaccatcgacatcaacggtaaaaatcttgcgccactcatcaaaagccatatcaagaaacggcgctttggtcattgcacccgcattattcaccagcacatcaatgcgccccagccgttgaatgagtttctccagcgccagtgccccttctggtagattgccgagatccagctgcacgatctccgcacgtacgccgtggctaactacctcacgcgcggtatcttttgccccttcttcatcactgtgccaggtaataccaatatcaaacccctgctgcgccagtaataacgcgcactctttgccgatcccgctatcggaggcggtaataatcgcaacctgtgccatcgagttctccacttaacgctgaataaacgttaagtatagaaggcgcatatcatcagcgtttgtaccccccgcccaacgcaccagtgagttgaatggaggcatccagccactgcccttgcaataacaggccattggcccgctcacgcagcgcggggattctggcttcgctgacgcgggaaccagcaatgatgcccgcgttaaagcgcgcctgcgcaagacctaccacacgcaaggcatcgcgctcaatttgcgcctgatgctggtttttctccgccagtgtctgaacctgactggctgcccgcgccacgtcattcaccgcttcaaccaccgctttgttgtagctggcgatagacaagttgctttcggcttttgcgatatcgagattggcgttaagacgaccactatcgaaaatgggtagcgtcaggcctgccgtaacgcccatttgctgcgcggaatgacggaacagatcgcttaagtgcaacgcatcctgttgcaggaaggccatcaggttgatgtcaggataaaatgccgcttttgccgcatcaatggtgcttaggctactctcaacgtaccagtgcgccgcctgcaaatctgcccgccgggccagtaaggagtaccccagttcatcaggaagctggcttgccactttcggcaacgcgaccggtttaagcttcaaactctttgtctggttatttgtaagtgcgcttaaccgtgcctcaataattttcattttccccgcgacatcgttgagctgctgccgggttttgctggcattaatatcggtttccacaccttcaacactagaagtaatcccgttctgatatagctggcgatcggtcgcgataatggtgttctgctctttttctatttgctgcaagaccgtgtttaacgccgcctgggtttgccactcccagtacaggcgggctacgctgccagccagcaattggcgggtttgctcgcgttccgccgcccgtgctttaaccgtacccaggcgggcagtaacctccgcccgattctttccccagatatcgagatgccagcccgccgttaagccaaaagtaccgttggtgtaccacgggccggtcgtacctgcggccggatcgttcagagcaaacggccccattaagccttctgcgctcattttttgccgctccatatccgccgaaaagtcgatctgcggaccatcctgagtggcaactgccttcgcctgggcttcagctagctgaatgcgctgttcagccacctgcatatccggtgcgttctgtagtgcattgttaattaaggaagactgttgattatcgtgatactccagccaccattggctgtctggccaaccattttcagcgccgtgggtaatgcggtgtcaacttgtgcagcgggcgtttgctggcttaacgcctggcgggtttcatgcataggcgcacacccggccagcatcagtaacagcggaaaacaggcgatggctggataaaaggaatcacgattcatgggggaataatcaggtaagaaaaggtgcgcggagattaccgtgtgttgcgatatattttttagtttcgcgtggcaatacatcagtggcaataaaacgacatatccagaaaaatatacactaagtgaatgatatcttccgatttatcttaatcgtttatggataacggcaaagggcttcgttttttcctatacttattcagcactcacaaataaaggaacgccaatgaaaattatactctgggctgtattgattattttcctgattgggctactggtggtgactggcgtatttaagatgatattttaaaattaattaatgtcatcaggtccgaaaataacgagaatatttcagtctctcatcctgttgcgctcctgtcatgtgcattgcttcatataatcactggcgcaaggagcgcgcagggggcggccaatcgccgccgccccctgcacccccgggctctggcgaacaaaatcgccgctgcgcggtgccctcggcttatcccttacggctaccgggtcgggcgcgaggtaacatccctgtaaaacgcgccctcagcccacatccatgtgggctgccccggccttcagggaacgcctcggcaattttgacgccaccaaacaaccgtgcggcctattgataaagagctaacacattgtcaaaaaacatcactatggttttttagagtttctcgatatcaattgcctgaatagcccttgcaatatcaggggaattattcaacacccgaacatgctgaaataattccgttgcttcatcgtattctttacgcaaataactcaaccactgtttaatccgcgcaacgtgatataacccggtatcgccctgcttttccagacgggtatatttttgcagcaaagcaaccacctccggccacggcattcgcggttcgttatattttaccacccggctcaggttgggaatattgagcgccccgcgaccaatcatcactgcgtcgcagccgctgatcgccatgcattgttgcgcgctctgccagtcccagatttcaccgttggcaatcaccggaatattcagccgctggcgaatatcgccaatcgcctgccagtcaatatgctccgcgcggtaaccctgctctttcgtccgcccatgcaccaccagctccgtagcgccagcctgttgaaccgcatcggcgatttcaaatttcttctcaccgctgtcccagcccagacgcactttcacgctgacgggcaaatgcgccggtacagcttcacgcatcgcttttgcaccctggtagatgagttcaggatctttgagtaacgtcgccccgccgccgctaccgttaaccgttttgctcgggcagccgcaattgagatccacgccccaggaacctaactccaccgcacgggcggcgttctctgccagccattgtgggaactgacctaacaactgcacgcgcaccagcgtaccagatggtgtccggctggcgttttgtagctcagggcaaatgcgatgaaagacttttaccggcagcagttgatccaccacgcggacaaactcggtgatgcacagatcgtagtcgttaacttcggtcagcaattcacgcaccagagagtcaagcactccctccatcggtgccagtaacacacgcatatcatcacccgcaaaaaaatgaggcgctatgttagcgcctatggtcagcggattaaaggtctgcaaagagggattgctgcaaactgcaatccctctctatgcttgatgtatgcctgagttcgctgcgcattgcgtaatgccggggagcgaaaaaataagcgctgatttcttaatgtgatcggtagcacgttttacgaattaattgtatgatgaatccatctcatctggggtgttgattatgagtaagacactgaacattatctggcaatatttacgcgctttcgtcctgatttatgcctgcctgtatgcaggcattttcattgcttccctgctaccggtaaccattccgggcagcatcatcgggatgctgatcctgtttgtcctgctggccttgcaaattcttccggcaaaatgggtcaatccggggtgctacgtactgattcgctatatggcgctattgtttgtgccgattggcgtaggcgtcatgcaatattttgatttgctccgcgcacagtttggcccggtagtggtttcctgtgcagtcagtacgctggtggtttttctggtggtgagctggagtagccaactggtacacggtgaacgtaaagtcgtaggtcagaaaggaagtgaagaatgatggcgaatatctggtggagtttaccgctgacattgattgtcttttttgccgcccgcaaactggcggcacggtataagtttcccttgcttaacccgttgctggtagcaatggtggtgatcattccttttttaatgctgactggcatctcttacgacagctactttaaaggtagcgaagtgctaaacgatctgctgcaaccggcggtcgtcgcgctggcctatcctttatatgagcagctacaccagatccgcgcgcgctggaaaagcatcatcaccatctgttttatcggcagcgtggttgcgatggtgacggggacttccgtggcattgttgatgggcgctagtccggaaatcgccgcgagtatcctgccgaaaagtgtcaccacgcctattgcaatggcggttggcggcagtattggcggtattccggcaatcagcgcagtttgcgtgattttcgtcggcatcctcggcgcggtatttggccatacattgcttaatgcgatgcgtattcgtaccaaagctgcgcgcggtctggcaatggggactgccagccacgccctcggtacggcgcgctgcgccgagctggattatcaggaaggtgcatttagtagcctagcgctggtgttatgcgggataattactagcctgatcgcaccgttccttttcccgattattctggcagtaatgggctaaaatttgcgatgcgtcgcgcatttttgatgtatgtttcacgcgttgcataattaatgagattcagatcacatataaagccacaacgggttcgtaaactgttatcccattacatgattatgaggcaacgccatgcatccacgttttcaaaccgcttttgcccaacttgcggataacttgcaatctgcactggaacctattctggcagacaagtacttccccgctttgttgaccggggagcaagtcagtagcctgaagagcgcaacggggctggacgaagacgcgctggcattcgcactacttccgctggcggcggcctgtgcgcgtacgccattgagcaattttaatgttggcgcaattgcgcgcggtgtgagcggaacctggtatttcggtgccaatatggaatttattggtgcgacaatgcagcaaaccgttcatgccgaacaaagcgcgatcagccacgcctggttgagtggtgaaaaagcgcttgcagccatcaccgttaactacacgccttgtggtcactgccgtcagtttatgaatgaactgaacagcggtctggatctgcgtattcatctgccgggccgcgaggcacacgcgctgcgtgactatctgccagatgcctttgggccgaaagatctggagattaaaacgctgctgatggacgaacaggatcacggctatgcgctgacgggtgatgcgctttctcaggcagcgattgcggcggcaaaccgtagccacatgccttacagtaagagcccaagcggtgtcgcgctggaatgtaaagacggtcgtattttcagtggcagctacgctgaaaacgccgcattcaacccgactctgccaccgttgcagggagcgttaattctgttgaatctcaagggttatgattacccggatatccagcgcgcggttctggcagaaaaagccgatgcgccgttgattcagtgggatgccacctccgcaacgctgaaagctctcggctgtcacagtatcgaccgagtgcttctcgcttaagcctggtgccggatgcggcgtgaacgccttgtccggcttgccagccctctcctggtgtcgaaattcccggcaaacagtttgccgtttcttgcgcaaaaccagcgggtaaagtagcctgatggaaattttccttagatcgagtctcctgcatgttaaagcgcgtgttcctcagcctgttagtcctgatcggcttgctgctgttgactgtgctcggcctcgatcgctggatgagctggaaaaccgcgccttatatctacgacgaattgcaggatctcccctaccgccaggtcggtgtggtgctcggaacagcaaaatattatcgtactggcgtaattaatcagtattatcgctaccgcattcaaggagcgattaatgcctataacagcggtaaggtaaattatctattactgagcggcgataacgcattgcaaagttataatgagccgatgaccatgcgcaaagatttaatcgctgctggtgtcgacccaagtgatattgttctcgattacgcaggctttcgtacgctggattccatcgtgcgtacacgcaaagttttcgatactaatgatttcattattatcacccaacgtttccactgtgagcgagcattatttattgcgctgcatatggggattcaggctcagtgttatgccgtaccgagtccgaaagatatgctgagtgtacgtattcgtgaatttgccgcccgtttcggtgcgctggctgacctttatatttttaaacgtgaaccgcgttttttagggccgctggtccctattccggctatgcaccaggtaccggaagatgcgcaggggtatcccgccgtcacacccgaacagttacttgaattacaaaagaaacaaggaaagtaattatggatgtacagcagttttttgtcgttgccgtttttttccttatcccgatattttgtttccgcgaagcatggaaaggctggcgcgcaggcgcgattgataaacgggttaaaaatgcaccggaaccggtgtatgtctggcgagcaaaaaatcccggactctttttcgcttatatggtggcatatatcggcttcggaattttatctatcggcatgattgtttatcttattttctatcgttaatattcccctctccagttaattattgagaataattattacttcacctgataagctgcggatatcacattcctaaccgcagctatttgtgaatcttttcacagtttaaattcccccgcacgcttagccttaatatcagtacattattatttactaaacgctcgccttaattacctatagcattaaggaagatcacatgccgcaacaaaattatctggatgaactcactccggcttttacgtctttactggcgattaaagaagcctctcgctgtttattatgtcacgacgctccctgtagtcaggcttgcccggcacagaccgatccggggaaatttattcgcagtatctactttcgtaattttaaaggcgctgccgagacaattcgcgaaaataatgccctcggtgccgtttgtgccagagtgtgcccgacggagaaattatgccaaagcggttgtacccgtgccggtgttgatgctcccattgatatcggccgcttacagcgttttgttactgattttgaacaacaaaccggaatggaaatttatcagcccggtactaaaacgctcggcaaagtcgcgattattggcgcaggtcctgccggattgcaggccagtgtgacactgacaaaccagggttatgacgtcacgatttatgagaaagaagcgcaccccggtggctggttgcgtaacggtattccgcaattccggttaccgcaaagtgtgctggatgcagagatcgcccgtattgaaaaaatgggcgtgaccattaagtgcaacaacgaagtcggtaacacactcacccttgagcagctgaaagcagaaaaccgcgcggtactggtcaccgtggggttaagtagcggttccgggctaccgctgtttgagcatagtgacgttgagattgccgtcgacttcttgcaacgtgcacgacaggcgcaaggcgatatcagcattccacaaagcgcattaattatcggcggcggtgatgtcgcgatggacgtagccagcacgctgaaagttctcggctgtcaggcggtaacttgcgtagcgcgtgaagagttagatgagtttccggcaagcgaaaaagagtttaccagcgcccgggagctgggcgttagcatcatcgatggattcacgccagtagccgtggaaggcaataaagtcacgtttaagcatgtacggttaagcggcgaactgacgatggcggcagataaaattattctcgccgtcggtcagcatgccagactagatgcctttgcggagttagagccgcagcgtaacaccatcaaaacacaaaattaccagacccgcgacccgcaagtctttgctgctggcgatattgttgagggtgacaaaaccgtggtctatgccgtgaaaaccgggaaagaagccgccgaggcgattcatcactatttagagggagcttgcagttgttaaattaatatttagagggagcttgctcatgttaacgaaagatcttagcattactttttgcggcgtgaagtttcccaacccgttctgcctctcttctagcccggtaggcaactgctatgagatgtgtgccaaagcctacgacacaggttggggcggtgtggtgtttaaaacgatcggcttttttatcgccaacgaagtcagcccgcgttttgatcatctggtgaaagaagataccggttttatcggcttcaaaaatatggagcagattgctgaacatccgttggaagagaatctggccgccctgcgtcggctgaaggaagattacccggacaaagtattgatcgctagcatcatgggggaaaatgagcagcaatgggaggagctggcgcgcctggtgcaagaagctggcgcggatatgatcgagtgtaacttctcctgtccgcaaatgacttctcatgcgatgggtagcgatgtcgggcaaagcccggagctggtagaaaaatattgtcgggcagtgaaacggggttccacgctgccaatgctggcgaagatgacgccgaatatcggtgatatgtgcgaagtggcgctggcggcgaagcgcggcggcgcagatggcattgcggcgattaacaccgttaaatccatcaccaatatcgatcttaatcagaaaatcggtatgccgatcgttaacggaaaaagcagtatttccggatattccggtaaagcggtaaaaccgatcgccctgcgcttcattcagcaaatgcgcacccatccagaactgcgcgatttcccaatcagcggtatcggcggcattgaaacctgggaggatgcggctgagtttttattgctcggcgcagcaacgttacaggtgaccaccggcatcatgcagtacgggtatcggatagtggaagatatggcaagcgggttgagccattatctcgccgatcagggatttgatagcctgcaggagatggtaggtctggcgaataacaatattgtcccggcggaagatttagaccgcagttatattgtctatccccgtatcaatcttgataaatgtgttggctgtggacgctgttatatttcctgttacgacggcggtcaccaggcgatggaatggagcgagaaaacccgcacaccgcattgtaataccgagaaatgtgtgggttgtctgctttgtggtcacgtctgcccggtgggttgtattgagctcggggaagtgaagtttaagaaaggcgagaaagaacacccggtaacgttgtaaaaccagagacgcatccggcatttggttcctgtcgccggatgcggcttgaacgccttatccggcctacaaaaccatacaaatcagtatgttgagcttattgtaggccggataaaacgcgccagcgttgcatccggcatttggctcctgttgccggatgcggcgtgaacgccttatccggcctacaaaaccacacagatcatgatgttatgtgcgtttatgaccgaatgcggaccacattcacatcatttcttacgcgcgtatttcagactatccagcgctacggcgaagataataatcgcccctttgatgatgtactgccagtatgggtttacgccgatatacgtcaggccatagttgatgacggtaaaaataattaccccggtcaccacgccaatcaccgtccccacaccgccgctgaagcttacaccgcctaccacgcacgccgcgatagcatccagctcatacataaagccgaggttgttggtggcagagccgatacgtccggcttctaacatcccgccaaaggcatagaacacgccagacaacgcgtagatcatcagcaggttcaggccgacgttgacaccagatacttttgccgcttccgggttaccgccaatggcaaaaatgttcttaccgaagcgggttttgttccacaacacccagacgaacgccaccgcaatcaacgcgtagaaggtgatgtaagagagacggaaactccccagcgcgacaaagccctgagcaaaggtagagaagccactgtcaaaaccagaaattgggctcgccccgacaaagtcgtaatagaggctgttgatgccatagacgatgatcatcgtgccgagcgtggtaatgaacggcgtcacgttgagataagcgataatcagaccgttgatcaaaccgatcaccgcaccaatggcacagacaatcagaataaccagcgcaatcggcatcgtcgccatttccgggaacactttgttggcgttatccatggactgcaataatgtcgcagccaccactgccgccagccctacctgacgaccagcagaaagatcggtcccctgggtgacaattaaccctgccacaccgagcgcgataataatacgcacgctactctgggtgagaatattacttaagttcaacagacttaaaaatgttgggtcctggaaaataataatcgccagcaaaactaaaagaacgacgtaaataccgccctctttcaggtaagtaagaaaacttttcttatttaacgcactcatgggaagcccctaatcttaaaggtgcaaagacgcaagacgcagaatttcgttttgcgttgttgtttttgtatcgacaattccggaaacgagaccattgctcatgaccagaatacggtctgttatccctaacaactcaggcatttcagaggagataataataatccccttgcctttcttcgccagttcggcaattaactgataaatttcaaacttcgccccgacatcaataccgcgcgtcggttcatcgagcattaatatttctggttgcgttagtagccagcgaccaataatcaccttttgctgattaccaccggagaggctaccaatttgcgtccgatgacccggcgtttttacccgcatgctatcaatcacccactgggtatcgcttttcatccggctgttatccagtaaaccaactttatttttgtagttgcgaatattggaaattaagctgttaaaaccaatatccagataggcataaattcccgtactgcggcgctcctcagttaccagtgcaaatccatggtttatggcttcgttggcattatggttattgatctgtttgccgtgcaacgttatggtgccagcgcttttctcgcgaataccaaataacgtctcaacaatatcggtacgtttcgcccccaccagaccggcaataccgaggatctcccctttatgcagatcaaagctgacatcgcgaatgctcggctggcgcagactcgtcaggttacgtacctcgaggatgacttcgcccggtttgttttctttgtcagggaaacgctggttaagagaacgcccaaccatcatggcgatgatcttgtccatcgtcagtcctgccagcggttcggtggcgatccactgaccgtcgcgcaatacggtaacttcatcacataactggaagatttcttccattttatggctgatataaacaataccgcagccgcgctcttttaatttacgaataatagtgaacagatgattgacctctttttcggttaagctagaagtcggttcatccataatcacaattttcgcgttataggaaaacgctttggcgatttcgatcatctgcatttggctaacggataatgtgccgacgcgcgcacgcggatcgatatcaatatccagttcgtcaaaaatcgctttggtttcgcggtacattttgtcctgatcgacaaacatgcctttggtgggatatcgccccagccacatgttatccatcacgctacgttgtaataccaggtttaactcctggtgtaccatgctaataccattttccagggcttcttttgcagaatggaaatcgatctctttaccctggaataaaatggtgccggagtctttttgataaataccaaacaggcattttaataatgtgctttttcctgcaccgttttcccccattaatgcatggatagaatgtggccggacttttaaattaacgttatcaagtgccttaacaccaggaaaggacttgttgataccgctcatttccaacaagtattccccggaggacggagtcgtactgctgaccatataattttaccttgttggccatacaataagggcgcagtaatagactgcgcccaatcagtcttatttcttgctgaattcagccaggttgtctttatctacgccaacataaggtacgcggaccactttgttgtcgattttccagttggtgccatcagccgcacctttaccatcggccaggtttttcgccagatcaaaggtcgctttcgcctggttgttagcatcgttcagtacggtgcccgccagtgcaccggatttcaccagcgccagcgcttctggcagcgcatcgacgccaaacaccggaatgctggacttgttgtgtgctttcagcgcttcaaccgcgcccattgccatcgcatcgttgttggcgataaccacttcgattttgttggcgttcgggccagacagccaggcgtccatcttatctttcgcctgagcggtgtcccacattgcggtatctaactgtaactgttcagttttgatgcctttatcgttcaattctttaatcacgtaagtggtacgtgcttctgcatccggatggcccggttcacctttcagcagtacgaactgaatctgaccgtctttgttcagatcccaaccctgattcgccgcccagtgtttagcaatcaaatcgccttgaataatgccggactctttggagtcagtgccaacgtagtaggctttgtcgtagctatccagcgccttacgagacggttctttgttgaagaaaaccaccggcacgttttgcccacgcgctttctcaatcaccgtacccgcagctgccgggtcaaccaggttgattgccagtgccttcacccctttcgccagcaatacgtcgatctgatcgttctgcttggactggtcattctgagaatcattcatcagcagctgaacatctggcgcggctttcgcatcttgctcaatagccttgcgcactacagacataaagttatcgtcgtacttatagattgttacaccaatgcgagtatcagcagcgtgtgcagcggcaccgaataacatgctggccatcacagcagacagggttaacaccttcttattcatggtatctccggtttttcttatgcagggtagtgcttgagataaatgctcggcggggcagtagagttaatgaagtgttactgaacgccgaagctcactttttaaaattcgttcttccatgcccggtaacgctccagaaaacggctttaattgttgttatgacgctgttacctcggcaaaagtgattattcactgttacatacgggttacaacgttaaaacggtgcaatcatagctatcacattgttaagatactgtgaaatcactcacagattgaaagcggttacatcgcctgatttgtactgttagtgatcgccgccgcattctggcgtgttgcgacagaatggcgacgcactaacgtcggcataaaacagtggctggcacgaggatcaatattgcctgctgccccctgcaaggccagttcggtggctaatttcgccatactagcaatgggataacgcacggtcgttaattgcgggtcggtgtaacgggcgatgggaatatcatcgaaaccgatgatactgagatgtaacggaatcgcaatgccattatcttttaatgctgtcagtgcgccagcggccatattgtcgttataagcaaatacagcggtaagttgtagattgcgccccagcagttcaaccatcgccgcctcaccgcccggcatgtccggcgtaccagcgccaatccagctttccggcggaataatatcctgctctttcaacgcactcatccagcctgctttacgcatggcgtcatcttcaatgccgtggctggaagaaagataaccaatacgttgatgaccgttattcagcaacatgcgcgtcgccattcgggcaccgctgagattatccaggcaaacgcaacgatgggcgtaccccggcacaacgcggttgattaacaccataccgggaatgttatccataaattgcgccagttcatcgtcactcaatgctttactgtgaacaatcaacgcattacaacgctggcgaattaacacctcaatggcgtgacgctctttttccgcttcatgatagctattgccgattagcacgtatttctgatgctgctgagcgaccagatccaccgcttttaccagcgcgccgaaaaacgcatcagaaacgtccatcaccaccacgccaatggtgtcgctaacctgagttgccagcgcctgggcattggcgtttggccgataatccagctcactcacggctttcattactgcttcacgcgtgtcggcactgaccagcgtgctgttattgagcacccgggaaaccgttgccacagagacgccagcctgacgcgctacatcacgaatggtgatcatattcactacctgttatgagattgcagtaaatgactgcttgctggcggctattttgtcagcactgaatacaggacttcgtgaatcgagtcacagcaatggaaacggttacagccgttttgttaacgaatgtgatccagatcgttatctacttgttttagatattgccggtccggcagcacgcaaagttaactgacgccagagccattccaccggcccctggcggaagtaacgcagccagataacagagaagaggatattcgccagccataccggaataacaaacgccagcagctccaggcggtcaaaatgcataaacaaaccgaggtggtaaaaaagcgtggtacaaatcagcgtttgcaatagatagttggtcagcgccatccgtccgacgcaggcgatcgcaagcaccagcttaaagcggctcaattgcggccagaagccataaaacaggctcgcatagccaatcgcctgaaacggcgcactcagttcccgcggcatttgaagtaagaaggcacaccagcgatacgcccagtccagctgccattgcagggcgatggcaggaaggttaatggtcaccccaatcgccaccagcacaaaaccagtacgacgatagtgacgtaagctgaactgccctttcagccagccgctgcgcatcagcgccgcaccaatgagcatcatccctgccagttgccagccatactgtgcgcccagtgccagtaaactgttgccaacaccatcggcacgattactgatcgcttcaacgccgccgtgaagcttccagtatttttcatacaaaatagcgcttgcatccggcgtccaggcgcggctggtctggctgtcggaaatcagccccaataacagcaaaacgccaagccccaccagataaagcatgacgcctgtattaaacaggctttttacgcttggcgcatcgcgcaccagccgccagcagattaagcccaccagcccgtaagccagcaaaatatcgccgtcccagaacaataaaccgtgaataaagcccaacaagactaacagcgttaaccggctctggatccagcgtctgccacggggcagcaacatttgcaggcccgcaccaaacagtagcgcaaaaagcgtgaggaatttcacctggccgatgagatcaagaaatgcccaagtccatgcatcccgcggcgtaatagcaccgtaccaggcgggattgagataagccgcctttggtagcccaaaggcgctgatgtttaatagcaggatccccagaatggcgacgccgcgaacaaaatcgagcgtgacgttgcgctccatggttcctgccttttaatcagttgtgatgacgcacagcgcgcagaaactcgtggcgcgtattctgactggatttgaacaatccaccaagagaggtcgttgtcgtggcactggttgcatcgcggatgccacgcgccttcacgcagtaatgcaccgcgtcgatgctgacagccacgttattggtgcccagcagcgtttgtagcgcaataagaatttgctgcgtcagacgttcctgcacctgcggacgctgggcaaagaactgcacaatgcggttaattttactcagaccgatcacgctatctttcgggatataggccaccgtcgctttgccatcgatggtaacaaaatggtgttcacaggtgctggtcagagtgatatcgcgcacggtgaccatttcatcgaccttcattttgttttcaatgagggtgattttcgggaaattggcgtaatccagaccggagaaaatttcatcgacatacattttagcgatgcgatgcggcgtttccatcaaactgtcatcagccaggtcgagattcagcagctgcatgatttcggtcatatgaccagcaataaggcttttgcgcgtttcgttatccatttcatgcacgggcgggcgcagcggtgtttccagtcctcgcgcaactaacgcttcatgaaccagggccgcttctttactgagacttggcatttatgatttctcctgcaggtgtgacgcctccgccctgcgtgggggcaaagttattaagctgatttacagcctgattattgtgcgtgaggcggcgcacataatccagtattcacagcgataattattgtaattgccgctgcctttcatcagcagatgttaaaacatcgttatgcaaatacggaagtgaaagttactcacagcacattgaataaacggtatgatgaagaaattgcaaacaacacaacaaggagccacgcatggaaatgctcgaagagcaccgctgttttgaaggctggcagcaacgctggcgacacgactccagtaccttaaactgcccgatgacgttcagtatctttctccctccacctcgtgatcacactccgccaccagtgctgtactggctttccggattaacctgcaatgacgagaacttcaccaccaaggcgggtgcccagcgggtagcggcggaactggggattgtactggtgatgccagacaccagcccgcgcggcgaaaaggttgccaacgacgatggctacgatttaggccagggcgcaggcttttatcttaatgccacgcaaccgccgtgggcgacgcattaccggatgtatgattatctgcgcgatgaattaccggcgctggttcagagccaatttaatgtcagcgaccgctgcgccattagcggtcacagtatgggtggtcacggtgcgctgattatggcgctgaaaaatccgggtaaatacaccagcgttagcgcctttgcgccaattgtgaatccgtgcagcgtcccgtggggaatcaaagcgtttagcagctatttaggtgaggacaaaaatgcatggctggaatgggacagttgcgcactgatgtatgccagtaacgcgcaggatgcgatcccgacgcttatcgatcagggcgataatgatcagtttcttgccgaccagttgcaacctgcggtactggcagaagccgcgcgccagaaagcgtggccgatgacgctgcgtattcagccgggatatgatcacagttactacttcatcgcctcttttatagaggatcacctgcgcttccatgcgcagtatttactgaagtgaaagtccgcccggttcgccgggcatcttctcatcagaagcgataatccactgccataaagtaacgacgtccgtcttcgttatagctgtagtcgtcacgactgagatccttgtcgccaaggttcagcacgcctgcgcgcagtttgacgtctttagtcacctgccaggccgcgccggtattccagatggtataaccgcccggtgttttagccgtcgcgctgtcggcgcgtttctgcccggtatagtgcccagaaacatagaaactccagtcttccagcgccagcggtttccagtccagcgtaccgttagcagtatggaacggcagatcggatagcggtttgttttcgccgttgctgacatcacgaccatcgttgtaggtgtagttgatgctcagtttccattcatcgttgaacggaattttcagttcggtttccacgccctgaatacgagctttgttaacgttgtagtagctaaataccggtatgcgccgtccgttagcgcccgtctcaaaaccaacaaagttttggtagcccggtgcagcgttgacgtcagacgtacggctgatgctgatacgatctttcacatcgttacggaaaacggtaacgctggattcaaccccttccagccagccttcttcacccatgtagtaaagccccagctcccaactttcgctggtttctggtttcagatccgggctacccacaatcttacatgcgccacggcaggaattgctcgtccagtcagggctaagttgcaacagagaaggtgctttaaatgccgtcgcccagccccctttcaccgttacggtgtcggtggcgttataaaccaggtaggcacgcggactccagtgttcaccgtaggtttcgtgatcgtccatacgcacgccggtcgtcagcgccagcggctcgaagatccgccattcatcttccacaaacagcgcgtactggctggcagacgttttggagctggttcccccggtcaggttcaccgcatcgctaagtttgtcgtgacgccattcaccgccaaccgtgagaaactgattaatcgccgtcagcggcaacgtgtatttgccgtcgaccgtattgctttcggaagttatcgggctgctgttgccagggtttttgttctcgactttctcaccgtagtatttcagttcgctggtgccgtaatcccaacgcccattatggctgacggagtagttctggcgttccaggcggtttttgtccaggctgtcggaatcacgatcctgacggtcgaaaccgtatccggcagtaaaatcgtgattttgattcggtgtccaggcaaattcgacattgccgtcgcggctggagaatccttcaatacgcggcgtttctccggtatcggtggtcgtactgttttgcgggtcatccttttcacgttttgccaggctgccgtaagctttcattcccagcacaccatcaattaatggtccactggtaaagaactgaccgttataggtgtcaccgcgatcgcgatgttcctgaatggtggtatcgacggtaacggtaccgctccatttctgaccgatttttttggtgatgatattcactacaccgccgagcgcatcggaaccgtacaggctgctcatcgggccacggaccacttcaatacgttcgatggaatcgaccgggatccagttcagatcgaaatcattgtggcggaagacggcattgcgggagttcacgcgtttaccgtcgacgagaatcagggtatagctgctgtccagaccacgaatactaacgcccttacggttatccccttcgttcgtcagttgtacgccaggcacttctttgaggacatccttcagattctgtaccggttttcgctgcaggtcttcctgggtaatgacgctgatactggcaggtgcatctttaagattttgttccacggaagatgcagtgacaaccatcgtttcgccatcatcatcgaccgctaacacaggccatgcacaagaaatagcggacaaacacagcccgacccgtacgaaagggttcaacctaaacattccatatctccatgaggtaactacgaaaataaaatgggttatcgctcacatcttcttcacgtccccttgcgtacggcagcatcgcggtggacttattttttatgcaggtgatcatcccagaaagccggaacagcctctgatttgtcagccttttttgattgcggcgtaacgataatgcaaacgataacaattatcaatccaaatgttaaattttatatccgcatgatttgtcagggaaatggaattgaaaaagccctctcggttgagagggcttagcaaggaagggaggaaacttatttcttatcgttctgcgggaacttcatttcgctgtagcgtacgaagtgagttcctttaatcagcttgtagccgaaccaaataatcaggaacagcgggataccaatatacgttgccgctacgccgccccagtcaatagtatctttcaggaacgcttcgtagttctggcccaaagtgataatcagacacagaatgaatgcgaagatcggccccagtgggaagaaaccactacggtacggcagatcgttaatgtcgtgtccctgcaatacgtaaccgcgacggaagcgatagtggctaatggcaatccccagccaggcgataaaacccgtcatcccggaggtgttcagcagccacaggtataccgtctggttgccaaacatggaggtcaggaagcacagaccggcaatcaccgtcgtcgcatacagcgcattacgcggcacgccaccacggctcagtttagcgaaaatgcgcggcgctttaccgtcacacgccagggtgtacagcatacgagtagacgcatacataccggagttacccgcactcagcaccgccgtcagaataactgcgttcatcaccgccgccgcagagagcagacccgcgtgctggaacaccagggtgaacggactaacgctgatgtctttaacatcgttacgcagcaggctcggatcggtgtacggaataatcaggctgataatcaggatcgcgaacacatagaacaacaggattcgccagaacacctgacgtaccgcgcgtggaatgtttttcgccggatcttcggactcgcctgcagcaataccgatcagctcggttccctggaaagagaagccgacaatcatagctacgccgatcatcgccgcaaaaccaccagcaaacggcgcttcgccgattgtccagttgctccagcccgcaggctgcgcgcctttgaagataccgataatcatcagcacgccaacgatgataaagacaataactgtcgtgactttgatcagactgaaccagtattccgcttcaccaaagccacgaacactgatgtagttcagcaggaagataacgccgaggaacaacgcactccagatccagcccggtgtatccgggaaccaccagctcatgaccagctgagctgcaaccaggtcaacggcgatagtcaccgcccagttgtaccagtagttccagcccagcgcgaagccaaagccttcttcaacatagttctgaccgtaagtggcaaagctaccggaaaccggcatatatgcagccagttcaccgagactggtcatcaggaagtaaaccatcaggccaatcagcatatagctgagcaatgccccgcccggacctgcctgagaaatcgttgcgccagaggcaacaaaaagacctgtaccgatggaaccgccaatggcaatcatcgtcaggtgacgcgcctttaattcacggcgtaagcccggcgcttctgtggttttagtttcggaaaccatacaaaaatgctatccatcttaaaaatgaggcgcgattgtagcagacgattggcaatccttccggcagaaatacacggttataagacaccttcatgatcgcccagggattataagtaaagcagccaatctcttttctggcgaatgcatgctgaaggcgctgcgtcacgaaatcgacacagcaccagcatgttcttgtacagcaacttaacgcggcacatttgcgggatcgcaatagtccagaaagcgccgtagcgcgttggaaaggtgtttttgccgatgatgtatacgccacaacgtacgcatcaggcgcggcagagggaccgcaacttcacttaatgtgcctgcctgcaattgatcttcaatcacacgtcggctcaggcaactaattcccaacccatgacgcaccgcatgtttgattgcctcggagttacctaattccatcgccatctcaaacttcggtaaatgactcagcaacagataatcgacaatctcccgcgtgccggaaccgcgttcacgcaggatccacggcgcagcggccagctgttctaaggtgaccggaccacgggccaacgggctagtcggcgcggcgaaaaccaccagctcgtcttccagccacggttcagaaatgatttcagtgctgtggcacggtccttcaataaagccaatatcaacgcggaaatccagcaccgcttgcatcacgtcctggctattcccaacgctaagttcaatcggcaactgcggataatcatggcgataacgggcgataactgcaggcagaatgtagttaccgatggtactactggcatagatacgaatcgcgccgttgtcttcgcgaaacagttgttcgatttcaaccgcctgttcaagcaatgccaacgcacgcggatagagcagccgcccgtgttcattaacaaccagtcttttccccacgcgatcaaacagttgcacgccaagctgcccttccaggtcggtcaaggctgcgctcactgcactttggctcaacgccagcatcacgctcgcctgggtggtacttccacttttcaatacttctgcaaaaacttccaactgccggagggtgatgtgcatagtcgcttaccacttataaagattaattataaatatataatcaattttatttttaaaccagttagtcgtaaccttatgcccggttaaaggagagggttatgacgaatatcaccttacagaaacaacatcgtacactgtggcattttattccggggttagccctgagtgcagttatcaccggggtcgccctgtggggtggttccattcccgcggttgcgggtgccgggtttagtgccctcaccctcgcaatcttgttggggatggttttaggcaacaccatctatccgcacatctggaaaagctgtgacggtggtgtgctgtttgccaagcaatatttattacgtctgggtatcattctttatggcttccgtctgacgttcagccaaattgccgatgtcggtatcagtgggatcatcattgacgtgttgacgctgtccagtaccttcctgctggcttgcttcctggggcagaaagtgtttggtctggataagcacaccagctggttgatcggtgccggtagcagtatctgtggtgctgccgcggtactggcgactgagccggtagtgaaagcggaagccagtaaagtaaccgtggctgttgcaaccgttgttatcttcgggaccgtcgcgattttcctctacccggcgatatatccgctgatgtctcaatggtttagtccggaaactttcggtatctacattggttctactgtgcacgaagtggcgcaggtggtggcggcaggtcatgccatcagcccggatgcggaaaacgcagcagttatttccaaaatgctgcgcgtgatgatgctggctccgttcctcatcctgctggcggcgcgtgttaaacagctgtctggggcgaacagcggcgagaaaagcaaaatcactattccgtggtttgccatcttgttcatcgtagttgccatctttaacagcttccacctgttaccgcagagcgtggtgaacatgctggtaacgctggataccttcctgctggcaatggcgatggcggcgctgggtctgaccactcacgtcagcgcgctgaaaaaagctggggcgaaacctctgctgatggcactggtactgtttgcctggctgattgttggtggtggtgcgattaactatgtgattcaaagcgtcatcgcataaaccactacatcttgctcctgttaacccgctatcattaccgttttcctccagcgggtttaacaggagtcctcgcatgaaatacattggagcgcacgttagtgctgctggcggtctggcaaatgccgcaattcgcgccgccgaaatcgacgcaaccgcgtttgccttgttcaccaaaaaccaacgtcagtggcgtgccgcaccgctcacgacgcaaaccatcgatgaattcaaagccgcctgtgaaaaatatcactacacaagcgcgcaaattcttccccacgacagttatctgattaacctcggacatccggtcactgaagctctggaaaaaagccgcgatgcctttatagatgaaatgcagcgttgcgaacagctggggctttctttgctcaacttccaccctggcagccatctgatgcagattagtgaagaggattgccttgcgcgtattgccgaatccatcaacattgcgctggataaaactcaaggtgtgacagcggtgatagaaaacaccgccggtcagggcagtaacttagggtttaaattcgaacatctcgcggcgattatcgacggcgtggaagataaatcccgcgtcggcgtctgcattgatacctgccatgctttcgctgccgggtatgatttgcgtactccagccgaatgcgagaaaacattcgcggattttgcccgtactgtcggctttaagtatctgcgcgggatgcaccttaacgatgcgaaaagcacctttggcagccgcgttgaccgccatcatagcctcggtgaaggcaatatcggtcatgatgcgttccgctggatcatgcaggacgaccgtttcgacggcattccgctgatcctcgaaaccatcaacccggatatctgggcagaagagatcgcctggctgaaagcgcaacaaactgaaaaagcggtagcctgaagatgaataaccgggaaaaggagatccttgcaattttacggcgtaacccgctgattcagcagaacgaaattgcggacatgctgcaaatcagccgtagccgcgttgcggcgcatattatggatttaatgcgcaaaggccggattaaaggcaaaggttacattctcaccgagcaggaatactgcgtagtggtggggacaatcaatatggatattcgcgggatggcggatatccgttacccgcaaagcgcttctcatcccggtacaattcattgcagtgcgggcggcgtgggacgcaacatcgcccacaatctggcgctgttaggccgtgacgtccatttgcttagtgtgattggcgatgacttttatggcgaaatgctcctggaagaaacgcgccgtgccggcgtgaatgtctccggctgcgttcgtttgcatggtcaaagcacaagcacgtatctggcaattgccaatcgagacgatcaaaccgtgctggcgattaacgatacccatctgctggaacagttgacaccgcaactactgaacgggagccgcgatttacttcgtcatgcgggcgtggtactggctgattgcaacctgacagccgaggcgctggaatgggtctttaccctcgctgatgaaatcccggtgtttgtcgataccgttagtgaattcaaagcgggcaaaatcaaacactggctggcgcatattcacaccctgaaacccactttaccggagctggaaattttatggggacaggcgatcaccagcgatgctgaccgtaataccgcagtgaatgcattgcatcagcaaggtgttcagcaactgtttgtttatttgcccgatgagagtgtttattgcagcgaaaaggatggagaacaatttttgctgaccgcgccagcgcatacgacagtagacagttttggtgctgacgatggttttatggcgggcctggtatatagctttcttgaaggatacagtttccgcgacagcgcccgttttgcggtagcctgcgcggcaattagccgcgccagcggcagcttaaacaaccctaccctgtctgccgataacgcgcttagtttagtgccaatggtgtaacaatgttgccggatgcgacgcttaacgcgtcttatccggcctacaaatcaggcaatttcagcaagtaaatgtaggcctgataagcttgcgcatcaggcaatgacactcaagctaaaccaataaagaacccggcaatggtcgcactcatcaagttggaaagcgtcgccgccgccagcgcccgtaaaccaagctgggcgatttccggcgcacggtgtggcgcaaccgcagaaaacgcccccaccaccaccccgatagaaccaaagttagcgaaaccgcacaacgcgaaggaaataatcgccacagttttagcatcgagagtgccagccgtttgcagatagggactgaaattgagataagcgacaaattcatttattgccagtttctgtccaatcaaactcccggcaagattcgcatcactccagtccacacccatcacccacgccagtggagccagcaggtaacctaaaatggactccaggctggcatgttcaaaaccaaaccagccaccaacgccgccgataataccgttaatcaacgcaattattgcaacaaatgccatcaccactgttgccacacctgcggcgattttcagcccggtcattgcccctgtcgcagcggcttcaataatgctttttggcggtgtttcggtgaaagagaggttattaaaggaaacctggctagattccgttgccgggcttaacaggcgggcaaacaagatcccgccagggatcgccattaaacttgccgccagcagatattccacaggcacgcccagtgcggcgtaaccaatcattgtgctaccagcaatgctggccatgccactacaaatcgctgtaaataattcattgcgattcagacgatcgataaagggtttgacgattgccggaatttcgttttgcccgaggaaaatggtggtgaccgcgacgaaactctcgatcttgctgatatttaatgctttctggaagataccgccgagaattcgaattaaaatccccatcacaccgatgtagtagagaatactcaccagcgcggtgacgaagataattgccggtaacaccctgaaaccaaagataaatcctgcaccatcaaataaggtatccattttcggtccgaccagagaaccgaagataaatgcgctacccgcgtcgctgtacgccatcactttatgcacgccaaaagcgactttttcagcgacccaacgccctggcggtaaccaaagcataatgccgccaatcacgacctgtaacactaacgccgcgccaacggtacgcaggctgatcttcttcttgtttacactcagtaaaaacgcaatcgtcagcaataccaccattcccagaacacttctcatgacatccatagtgattatctcttcatgtcatattgggcgacggctttctgcccatcagaaatagccaggcctgcatcttgcgataccggcccggcttgttatcaacacttaatgggttttgatgtagccgcgcacgcactcttcgactaatccccagaaccagtctgtatcaatagtgatgccgactttggtattggcgggcttgccaagaacgcccagctcgtcgcagacggtacgcccatagcaagggccactgttgacgtccacttcgacgtacatctcctgggttttaatgccatcagggttaatcagataaccgatgcaggtggcgtcgtgcaccgggccgccagcaaggccgtagttttcgaactgcgttttgagagtgaagttcatgatgtcgctgaacagctctccggcggggccgcctgccctttccatccgagcaatcacgtccggggtgcaaacggtctggttggtgagatcgaggcccatcatcactaatggaacgccggaggtgaacactacgcgtgcggcttccgggtcggcaaagatgttgaactcggcagatggcgtgaagttgcctgtaccgtaagcgccgcccattagcacaatttcacggattttgggcaggatcgcgggttgcatacgcattgccaccgcgatattactaagcggaccaaccggcaccagagtgatatcgccatcgcttgccatcagggtatcaatgatatatttcaccgcatgagtgctttctgcctggcgggtcagcggctcgaataccgggccatccagtccggtttcaccgtgaatattatcggcaacgatttgttgacgcataatgggctgcggcatccccgcataaaccggaacattaatctccagtttctggcaaacattcaggccattaattaatgttttatcaagcgtctgattacccgctacaatagtgatgcctaataaatctattgccggatgtttcgccgccatcattatagcaatagcatcatcatgacccggatcacaatccagaataatttttctcttttccattgtttatttcctctgtttccagttgcgttattttttctacagcaaagaaaattcgaccgggccgatgattgaatcttaacaacagcgtacgtatgctaaatatgagaaatctcatagcggataaacatcgtgaaagaaatccacaataatgatcttaagcagcaattgatgagtgaatccgcgtttaaggattgctttttaacggatgttagtgccgatacgcggctgtttcattttttagcgcgtgactacattgtgcaggaagggcaacagccgtcctggctgttttacctgacgcgaggccgcgccaggctttacgccacgctagctaatggtcgcgtgagcctgatcgatttctttgccgccccctgttttattggcgagattgagttaatcgataaagaccatgaaccgcgtgcggtgcaggctattgaagagtgttggtgccttgcgctccctatgaaacattaccgtccgctgttattaaacgacacgctatttttacgaaaactctgcgtcaccttaagtcataaaaattatcgtaatattgtttctttaactcagaatcaaagttttccgttagtgaatcgcctggcagcatttatattactcagccaggaaggtgatctttatcacgaaaagcatacgcaagcggcagagtatttaggcgtttcttatcgacatcttttatatgttctcgcgcagttcattcacgacggtttattaattaaaagcaagaaagggtatctcattaaaaacagaaagcagttgagtggactggcgctggagatggacccggagaataaattctccgggatgatgcagtaaaaattattttcaatagcgcgattgccggatgcaacgcttaatacgttttatccggtctacaaatcgagcattacgccagaccaataaagaacccggcaatagtcgcactcatcaggttggaaagcgttgctgctgccagcgcccgtaaaccaagctgggcgatttccggcgcgcgttttgggctaatagcgctaaatgcgccaacgacaacaccgatagaaccaaagttagcaaaaccacaaagcgcaaaggagataatcgcaatggttttcacttccagcgtgccgcccgtttgcaggtatggggagaaactcaggtaagcgacgaattcgttaatcgccagtttctgcccaatcaggctacccgcaagattggcatcactccagtccacacccatgatccacgccagcggtgccagcacatagccaaaaatactttccagagaggcattggcgaaaccaaaccagccgccaattccgccgataatgccgttgatcagcgcaataattgcgacaaacgccattaccaccgtcgccacaccagcggcgatttttagcccggtcatcgcaccgctcgccgccgcttcgataaagctttttggcggcgtttcgctgaagctcagattttcaaatgtgacctggctaggctcggttgccgggctaagaatacgtgcaaacaaaatcccgccagggatcgccatcaggcttgccgctaacaggtagtcaattggtacgcccattccggcataaccaatcatcatgctaccagcaatggacgccatcccgctacaaattgcggtaaacaactcgttgcgattcatgcgatcgataaacggtttaacgatcgccgggatctcattttgcccgaggaaaatagtagtaaccgcaacaaaagattcgattttgctgatgttgagggctttctggaaaatgctgccaaggatgcgaatcagcagccccatcacgccaatgtagtacagcagactgatgagcgcagtaacgaaaataatcgccggaagtacgcgaaaggcgaagataaaacccgcaccgtcaaacaggacatccattttcggcccaaccaggctaccaaaaatgaaggcgctaccggcatcactgtaagacatcactttatgaacgcctaatgccgcctgttctactgcccattttcccggtgggaagtagagcatgatgccaccaatagcgatttgcagcagcagtgcggctccaaccgtgcgcaaactgatgctctttttattcacactcaacagaaatgctattgccagtaacaccaccatccccacaacacttctcattatatccataatgattttcccttcatgccggtaaacccggcgtcagcgccaggttttggtatgcttgatgagtacgggcgacggctttctgcccgtcagaaattaacccgcgagacgctgatattctttggcaatttcgctcgccagaatggcgttgttgaacaccagctggatgttggatttcaggctgtcaccgccggtcagttcagcaacgcgcgccagcaggaatggcgtactttctttaccaatgactccctgagcttcagcttcagctaccgcctgatcgatcgccgcattgatagtgtgttccggcatagcaaactgttccgggatcgggttcgctaccacgaggccaccgttcagaccgctttgccatttcaccaccattgcacgggcaatttcgctggcgctgtcgagacgaatgctgacgtcaaacgggctggtgcggcagaaaaacgcaggcagcgctttagtctgatagccaattaacggcacaccgaaggtttctaaatactcagtggttaatcctaaatcgagaatagatttcgccccggcacaaacaacggtgacattagtatttgccagttcttgcaaatcggcagaaatatcgaaggtatgttccgccccgcgatgcacaccaccaattcccccggtggcaaatactttaattccggcaagcgccgcaataatcatcgtactagccacagtggttgcgccattttttccggcggcaacaacaaaaggtaaatcgcgacgactaactttggtcacgttatgcccttcacgacccagtaattcaatttcttctttgcttaaccccactttcatcacgccgccaataatggcgatcgtggcaggtacagcgccctgtttacgaatagtttcttcaacttcaattgcggtctgggcattttgtgggaacggcatcccgtgagaaataatggtgctttccagcgccacaaccggttttttgttttttaaagcgtcctgcacttccggggaaatttgtaataattcaggggaaatttttaattcagacattctgcgttctccactaagcttataacgttggcaatgcttaaatcggggttattggtgtattcacaggagagcgccatactgctacatccctgtgcgaaacgaacagattcggcaaacggcattccgtctacccaacagctagcaagtcccgccatcatggcatcgcccgctccggtaacattaataacattggttttgatcggcgcagaccagccactttcaccgctgatatcgctgtaataaacgccgtcgccgcccatgctcaataccagtcggttcaggccatgttgatggaaccaggcagcaacttttgccacatcttcacgcccactcagcgcaatcccactcagggtttccgcttcaaggcggtttggcttgagagtgtggatctgatttagacggtcgcgcactttgacacatttccatgcgctaaccggatcgacaaatacgggtacgttggcggcattatccagaatccatgccagtgcctcttcactgatattacagtccgcgacaatgacctttgccctctgaataaattcaccgtgctgtgcgagatattcagctgtaatagcgttgctaatattcatgtcatttatagcaaccagcatttcaccggtattatcgagtaaacttaaataactgctcgtattttctcccggcacaatcaggcatttatcgacataaacgccagattgattggtttgcgttagcaggctttgaccataaaaatcactgcctacggcgctcagtagccaggctttgttacccagcaacgccaggttttgtgcaatattgcgccctactccaccaggcgtaaattttattttacctggattactatccgcataatttaaactttcatgactatatccggcgacatcaatattcgcgctacctataattacgacataatccttttcgcgcatagcacgtcctctggtaaaaaattaccaaccctgtcaatccacaagaatatagatactgcaaagacggtttaaacatgtgttcatatttaaacatgtgctcatagtatgcatgttttacgtaaagtaaattaccgccagagaggcaaaatgggcagatttgagcaggctcacaaaatgcgattaaatgcctgaattacaaaagcgaggaatttgtgacgggatgcacagaacagaacaataaaaaagggcagaaaataatctgcccttgaggaaataacctgagtgtttgatgaacgtttgaagtttctactgaaagataaaaccatttaaattcataaaattacattcacaaaccggtcattctctttgcgctcatcaaatgttacaggacaggaaatttctgccctgtaacacaccttttattacgctgctttcgctactgcgtccacttccggacgtttcaggaaggcataggccaaacccgccaccagcgtaccggcaataattgctaccaggtaacccaataccggcgtaatagcgccagggatcagcagaacaaacagaccaccgtgcggtgccatcagtttcgcaccaatcgccatactgattgcgccagtcagcgccccacccacgatacagcacggcagcacacgcatcggatcacgagcagcaaacggaattgcaccttcgctaatgaagcacagtcccaataccagagcggctttgccaccttcctgctgcgctttgtcgaatttgcgacgcgccaccattgttgccagacccattgccagcggtggcaccatacctgccgccataatcgccgccatcgggccataggtttgagtactcagcagacccacaccgaatgcgtacgctgctttgtttaccggaccgcccatgtcagtacacatcatgccaccgaggatcgcccccagcagaaccgcattcgcagtccccatggtctgcagccagtgagtcagcccttcgagaatgccagcaactggtttaccgatcaggtagatcatcgccagaccgaccaccagactggaaattagcggaatgatcaggatcggtttcagcgcctccatactctgtggcagtttcaattgcgtactgattaacttcgcaatgtaaccagccaggaagcccgcaataataccaccaatgaagccagaaccggtgctgaccgccagcataccgccaatcagacccggagtgaggcccggacgatcggcaatggaaaaggcaatataacctgccagtaccggcaccatcagcgcaaaggcactaccaccaccaatctgcatcagcgccgcagccaacgtacccggctctttaaacgcttcgataccaaaagcaaaagaaagcgcgatacacagaccacctgcaacgaccatcggcagcatgtaagaaacgcccgtcagcaagtgacggtatgcgcctgcactctctttcttactttcagtggtcgccgtttgagctttgcccgccggttcatacggcgttgcttcagcaaccgctttatccagttcctgcgcggttttcttcagcgccagaccggtagaggtacgatacatcggtttaccagcaaatttcgccagatccacttcgatatctgccgccacaatcaccagatccgctgctgcgacttcttcgggagtgattgcattacccgcgccaacagaaccacgggtttcaactttcacccaccagccacgttttttcgcttcggtttcaatggcttcagccgccataaaggtgtgtgctacgccagtcgggcaagcagtcaccgcaactacgcgtttcggaccgctggcggcaactggtgctgtcgcagcgaccggcgcagtgtaaggtttcgcatggcctttggcttcactcaggaacagctcagggtgcgcaactgcccgggaaatatcgcccagccagacatttttaccgttcagcgcgctgtcgttcgggatggaatcaccgagaacaatcgccatttcagcgtcgttcggattgtcgatgatttccagttttgcttttcgcgccgccgcgcccagcagggtcttcgccatataggcgcgtgcctgaccgagattagcgtcaataatcagcagcgttttcattatgcctctcctgctgtcagttaaaaggttgtaagtcgacgcgcgccatcattgcggccaactgcggacgatcggtaatacccacattgctttgacttaccgccagggctgcaacagctgtcgccagacgcagtgtgtgttcactggattcacgcatcagcaagccataaatcaggccaccaaccatagaatcccctgcgccaacggtgcttacgacatcgacactcggtggtttggcgatccattcgccggaggcattaacccaaagcgcgccttcggcacccagactaataacaacatgcgcgatgccttgttcacgtagcgcatgtgcagcttcaatcacatctttcatttcaggcagtttacggcctgcccagatttccagctcgcggcggttaggtttcaccagccacggtgccgctttcaaacctgctactaacgcttcacggctactatcaaagataatgcaaggacactgactacgcaggcgagtcatccagtcggtgaacgcttccgggctgacgccactcggtaagcttccgctgacacagaccatatcgaactgaccgagccagctcagagaatcagtcacaaagcgttcccagtcggcgggggtgacttcaaaaccgctgaagttgaagtcggtcacttcgccgtctttttccgtcagcttaacgttaattcgggtgcgcccctgtacaacctggaaacggttggcaatgcccagctcgctgaacagttgctgaaaaccatcctgattgtctttacccaggaagccgccaacggtgacatcaattcccaggtcttttaatactttggccacgttgatgcctttacccgccgcatgcagaccggtggttttcaccaggttcacttcgccgcgttcaatttccgggcagaaaccaacaaggtcataagccggattaagggtgatagtagcaacacgtctgctcattatgcgccctccccaagaccagcagcgatagcgtcgccgattgctttcagcgcctgttcagcatctgcaccctgggcggtaaagcgtaggcgatgacctttcttaacgccaagtgccacaactttcatcagactacgtccgtttgccggtttgccggtaccatcaaggtttgtcacggtaatatcactgttaaattgtttaatggtattgaccagcatggtacctggacgagcatgcaggccgtgttcattgcgcaccacaaactccgcgcttaacacgtcgtcggtcggcgcatcatcgctggtcagcagcgccagcaacgttgccgcatccgctttcagcaagcggtcagctttattgtcgagcaataaatcagcgagacgcttaagaaccgcgatgggctgatcgtcattcatcgccacactcaccagcatggctgccgtttcgccgtccacatcaaaagcatttgccgcacggcttaccgcaatcgcgctacgcagattgccttcggcgctatcgctcagccagataccctgtccgagattcagcggttgttcattgatggctttggtgacgaaagtggcgtcaactgcccccgcctctttcagacgcgcagcgttcagcgcctgaagagtcagcagatcgctggcgacgatatccagtgtcagcatttcgttgtcgagcttcagctgctcactctgcttttcgcccatcagtaatgcgcgaagttcttctgctgttgttgcactcttcagttgttcagcaacggaatcatcgctcagtacgtgggtcagctggcgtagcaggcccagatgttcatcgctgctggcagcaataccgattgccacgtacgctacctgaccgtcaccccaggtgacgccttccgggaactgaaatacctgaacgccggttttcagcacctgatcgcgggtgtcggtagtgccgtgtggaatagcaataccattgccgaggaacgtactggtttgctgttcgcgcgccagcatgccattgacgtagccttctgctacattaccggcctgcaccagcgccgcagcgacctggcgaatcgcctcttctttgtctccggccttttcgcccggatggatgtcctgtacggataactggaacatagttctcctctcttgctgaattgaaacgattcagcctctatgagaaaaaaagcgccaacctggcttagggttaaagacaagatcgcgctgaaacgtttcaagaaagcataatacttctgtttcagcacgcaaggaaagccgtaaagttatgagcaaaagtttgatgtgctgcacaattttttgccatttttcctaattgctgatgggaaaatccgttatcagcaatttcatttcagcagcgtcagcagccaatcagcaacagtgaaatggcattttgactattcgtggcgcttttgatttcgctgtctgtttattttctgacaagcagcgtaaactccgcgtcttcctcttccagtgatcgaccagcatgcataactcccccgcagtctccagcgcgaaaagctttgacctgaccagcacggcgtttttaatcgttgcctttctcaccggtattgcgggcgctctgcaaaccccgacactcagtatttttcttaccgatgaagtacatgcccgtccggcgatggtgggattcttctttaccggcagcgctgtcattgggattctggtaagtcagtttctcgccgggcgctctgataagcgcggcgatcgcaaaagcctgattgtcttttgctgcctgttaggcgtgctggcctgcaccctttttgcctggaatcgcaactactttgttttgctattcgttggcgtctttcttagcagctttggcagcaccgctaacccgcaaatgtttgcccttgcccgtgaacatgccgacaaaaccggacgtgaggcggtgatgttcagctcttttttacgcgctcaggttagtctggcatgggtcattggcccaccgctggcttatgccttagcgatgggtttcagctttacggtaatgtatctgagcgcagcggtagcgtttattgtttgcggtgtgatggtgtggctgtttttaccgagcatgcgaaaagagcttccgctggcgaccggcacgatcgaagcgccgcgccgtaaccgtcgcgatacgctgctgctgtttgtcatttgtacattgatgtggggcagcaacagcctgtacatcatcaacatgccgctatttattatcaacgaactgcatcttcccgagaaactggccggtgtgatgatggggaccgccgccgggctggaaatcccgacgatgttgattgccggatatttcgccaaacgtctgggtaagcgtttcttaatgcgcgttgctgccgtgggtggcgtctgtttttacgcaggaatgctgatggcgcatagtcctgtcattctgttgggcttgcagctgctaaatgctatttttattggcattctgggcggcatcgggatgctctattttcaggatctgatgcccggtcaggcgggtagtgccaccacgctctataccaacactagccgcgtgggctggatcatcgcaggaagtgtggcgggcatcgtcgccgagatctggaattatcacgctgtgttctggtttgcgatggtgatgattatcgccactctgttttgcttactgcggattaaagatgtttaaggcgcggtcagcatttccagatcgataagccaggtcatggcctgctgacggctgttaccgcacatttcagcgctggcttgtaagcctgcacagactttcggtcgcagtgggctggtgaaaattttacagcgttgctgttcatcaagctgaatgcagggcgtattggcgggcttgccatctggcataccgggaatagggctggaaatactaggggcagtgcaacacgccccgcaacccggacggcattccatacgttgttctcttaaggttaaccaccggattgatgagcgcgcacagtaccaccttttttgcaccagcaaaagtgcgaataccacttgcccgaaaggcccgtcgcgagtactttgtcgcgatatttttgacattttcgactacaggaatttttcgatgccaagagcgaacgaaattaaaaaaggtatggtactgaattacaacggcaaactgctgctggttaaggatattgatattcagagccccactgcccgcggtgccgctacgctgtacaaaatgcgtttttctgatgtccgtaccgggctgaaagtagaagagcgtttcaaaggtgatgatatcgttgacaccgtgacgctgacccgccgttacgttgacttctcctatgtcgatggcaacgaatatgtctttatggataaagaagactataccccgtataccttcaccaaagatcagattgaagaagagttgctgtttatgccagagggcggcatgccggacatgcaggtgctgacctgggacggtcaactgctggcgcttgagctgccgcagaccgttgatctggaaatcgttgaaaccgcaccaggcatcaaaggggcatctgccagcgcccgtaacaaaccggcgacattgagcactggtctggtgattcaggtaccagaatacttaagcccgggcgaaaaaattcgtatccatatcgaagaacgccgttatatggggcgtgctgactaacttcagccgcatgcagaaaagggatagctcaggctgtcccttttttaatttattataccaatcttctattttgcgcttcctgaacaccttacgccctcaattttcactcgttgattgatcgccctcacacttcatcgcattaacaatccagaccaatttcaattgctgtcatataactttacactgtcgttgttaattaatcgttactaagacgtgactcctatgaatacaatcgcctccgttacgctcccgcatcatgtacacgctccacgctatgatcgccagcagttgcaaagtcgtatcgttcattttggctttggagcctttcaccgcgctcatcaggcgttactgaccgatcgtgtgctgaatgcccagggcggcgactgggggatctgtgaaatcagcttgttcagcggtgatcaactgatgagccagctccgcgcacagaaccatttatataccgtgctggagaaaggtgcggacggcaatcaggtgataattgtcggtgccgttcacgaatgccttaatgcaaaactggattccttagcggcaattattgagaaattttgcgagccacaggtggcaattgtttccctgacgattaccgaaaaaggctattgtattgacccggccaccggtgcactcgacaccagtaatccgcggattattcacgatctacaaacccctgaagaacctcactccgcaccgggtattctcgtcgaagcactgaaacgccgccgtgagcgcggccttacaccgtttaccgtgctctcctgcgacaatattcccgacaatggtcatgtggtgaaaaacgcggtgctgggaatggcagaaaaacgtagcccagaactcgccgggtggataaaagagcacgtcagttttccgggaaccatggtcgaccgcattgttccggctgcaaccgacgaaagtctggtggaaatcagccagcatctgggggtgaatgatccctgcgcgattagctgcgaaccgtttatccagtgggtggtggaagataacttcgtcgctgggcgtcctgcctgggaagtcgcaggtgtacaaatggtgaatgatgtcctgccatgggaagagatgaaactgcggatgcttaatggcagccactcttttctcgcttatctgggttacctcagtggattcgcccatatcagtgattgcatgcaggatcgcgcatttcgccatgccgccagaacattaatgctggatgagcaagcgccgacactgcaaattaaagatgtcgatttaacacaatatgcggataagttaattgcacgttttgctaatccggcgctgaaacataagacctggcaaatcgcgatggatggcagccagaaattaccgcaacgcatgctggcaggtattcgcatacatcaggggcgcgaaacggactggagcttgctggcattaggcgttgcaggctggatgcgttacgtcagcggcgttgatgatgccggaaatgccattgatgttcgcgatccgcttagcgataaaattcgcgaacttgttgcgggcagcagcagtgaacaacgcgtaaccgccctgctttccctgcgtgaagttttcggtgatgatctgccagataacccgcattttgtgcaggccatcgaacaagcctggcaacaaatcgtacaattcggcgcacatcaggcgctattaaacaccctcaaaatttaacgatttctgcggttaaagcggatgaagctcaccttcgtccgctctccccttctcttttctgccttttttagccaggattaacgctcagttaacttaccagagtattgcggagccgttgtgaccaggaccaacctcatcaccggttttctcggcagcgggaaaaccacgagcattcttcatctgttagcccataaagatcccaacgaaaaatgggcggtactggttaatgaatttggggaagtcggaattgatggtgctttgctcgccgatagcggcgcattgctgaaagagatccccggcggctgcatgtgctgcgttaatggtttacccatgcaggtagggttgaataccttactgcgtcagggaaaaccagaccgcttgttgatagagccgaccgggctgggccatccgaaacagatcctcgatctgttaaccgcaccagtctatgaaccgtggatagatctgcgcgccaccttgtgcattctcgatccgcgcttgctgctggacgaaaaaagcgccagcaatgaaaacttccgtgaccagctggctgccgcagacatcattgtcgccaataaatccgaccgtacgacgcccgaaagtgagcaagcgctacagcgttggtggcagcaaaatggtggcgatcgacaattaattcacagtgagcatgggaaagttgacggtcatcttctggatttgccgcgtcgcaatttagccgagttgcccgccagcgccgcgcattctcatcagcatgtcgtgaaaaaagggttagcagcgttaagcctgccagagcatcaacgctggcgtcgcagtctgaacagcgggcaaggatatcaggcctgcggctggatattcgacgctgatacggtattcgacaccattggcattctggaatgggcgcgacttgcaccggtggaacgcgtcaaaggcgtgctgcgtattcccgaagggctggtgcgaatcaaccgtcagggcgatgacctgcacattgaaacgcaaaacgttgcgccaccggacagccgtattgagctgatttccagcagcgaagctgactggaatgccttgcagagcgcgctgttgaagcttcgtttagcgactaccgcgtaaggttgcctgcgtttttcagtaagataattagagaaaatatgattaaaaatttgccgcaaatagtgttgttgaatattgtcggcctcgcgctgtttctttcctggtatatccccgttaatcatggattctggttgccgattgatgcggatattttttatttctttaatcagaaactggtcgaaagtaaggcctttttgtggctggttgcattgaccaacaatcgcgccttcgacggttgtagtctgctggcgatgggtatgttgatgctgagtttctggctgaaagaaaacgcccctggcagacgacgtatcgtgattattggtctggtcatgctattaactgcagtggtattaaaccagctgggtcaggcattaattcctgtaaaacgggccagcccaacattgacttttaccgatattaaccgcgtcagcgaactgctctctgttcccacgaaagatgccagtcgagatagctttcccggcgatcacggcatgatgctgcttatttttagcgcattcatgtggcgttatttcggcaaagttgcaggccttatcgcccttattatttttgtggtttttgcatttcccagagtaatgattggcgcacactggtttactgacatcattgtcggtagcatgaccgtgatattgatcggtttgccctgggtgttgctgacgccattaagtgatcgattaatcaccttttttgacaaaagtctaccaggaaaaaacaaacatttccaaaacaaataactcacagtaattaacatcatcagggttatttttatagtgaggataatcctgatgatgcgcaccgtgctttcatctatcgaacgcaaaaatcattctctaagtaaatgaatggattgcatgcgtttcactcaattgtactttaattgaccaaccccgcttattaactttctgtatcactttttcttataaaaaatcatgtaaaaccgctcgccaagaccgcaccaatcgggtaatctcgaactcgttttgcctcggcggtagattatcctcacagcatataattttgtgcgttagtccacagatttggccttaaggaattgtttcaacatgcccaggtaattagtctcgtgtcgcttggcatttttttataacgatatttgtcgttaaggacttcaagggaaaacaaacaacatggtcaaatctcaaccgattttgagatatatcttgcgcgggattcccgcgattgcagtagcggttctgctttctgcatgtagtgcaaataacaccgcaaagaatatgcatcctgagacacgtgcagtgggtagtgaaacaagtagtctgcaagcttctcaggatgaatttgaaaacctggttcgtaatgtcgacgtaaaaagccgaattatggatcagtatgctgactggaaaggcgtacgttatcgtctgggcggcagcactaaaaaaggtatcgattgttctggtttcgtacagcgtacattccgtgagcaatttggcttagaacttccgcgtagcacttacgaacagcaggaaatgggtaaatctgtttcccgcagtaatttgcgtacgggtgatttagttctgttccgtgccggtagtacgggacgccatgtcggtatttatatcggcaacaatcagtttgtccatgcttccaccagcagtggtgttattatttccagcatgaatgaaccgtactggaagaagcgttacaacgaagcacgccgggttctcagccgcagctaataaaccgtttggatgcaatcccttggctatcctgacgagttaactgaaagcactgcttaggcagtgcttttttgttttcattcatcagagaaaatgatgtttccgcgtcttgatccaggctatagtccggtcattgttatcttttaaatgttgtcgtaatttcaggaaattaacggaatcatgttcatacgcgctcccaattttggacgtaagctcctgcttacctgcattgttgcaggcgtaatgattgcgatactggtgagttgccttcagtttttagtggcctggcataagcacgaagtcaaatacgacacactgattaccgacgtacaaaagtatctcgatacctattttgccgacctgaaatccactactgaccggctccagccgctgaccttagatacctgccagcaagctaaccccgaactgaccgcccgcgcagcgtttagcatgaatgtccgaacgtttgtgctggtgaaagataaaaaaacattctgtagttctgcgaccggtgagatggacattccactcaatgaattgattccggcgctcgacattaataaaaacgtcgatatggcgatcttacccggcacgccgatggtgccgaacaaacccgcaatcgtcatctggtatcgcaaccctttgctgaaaaatagcggcgtctttgccgctctgaatctcaacctgacgcctagtctcttttatagtagtcggcaggaagattacgatggcgtcgccctcattattggcaatactgcgctatctaccttttctagtcgtttgatgaacgttaacgaattaaccgacatgccagtccgtgaaactaaaattgcgggcattcctctgaccgttcggctttatgcagatgactggacatggaacgatgtgtggtacgcatttttactgggcggcatgagtggaactgtcgttggcctgctctgctattacctgatgagcgtacgtatgcgccccggcagagaaatcatgaccgccatcaagcgcgaacaattttacgtggcgtatcaaccggtggtggatacacaagctttgcgagtaacgggcctggaagtactgctacgctggcggcatcctgtcgcgggagaaattcccccggatgccttcattaactttgccgaaagccaaaagatgattgtgccgctgactcagcacctgtttgagttaattgcccgcgatgccgcagaattagaaaaagtgctgccggtaggcgtcaaatttggtattaacattgcgccggaccatctgcacagcgaaagctttaaagcagatatccagaaactgctcacttccctgcccgcacaccatttccagattgtgctggaaattaccgagcgcgatatgttgaaagagcaagaagccacacaactcttcgcctggctgcacagcgtcggcgtagaaattgctattgatgacttcggcaccgggcacagcgcgcttatctatcttgagcgttttacgctcgattatctgaaaattgaccgtggatttatcaacgccatcggtacggaaacgatcacttcccccgtacttgacgcggtgctgacgctggcgaaacgcctcaatatgctgacggttgctgaaggggtcgaaacgccggaacaggcgcgatggctaagcgaacgcggcgttaatttcatgcaaggctactggattagccgcccgttaccgctggacgattttgttcgctggctaaagaaaccgtatacgccgcagtggtaaggtgtgcttacgtcccttattattcatagtgaaagcatgccggattgcggctaatgatgagtaaaaggaaatccgttgcagatgattgtgcgcatactgctgctgtttatcgctctgttcacctttggtgtgcaggcgcaggctatcaaggaaagctatgcctttgccgtgctgggcgaaccccggtacgcgtttaatttcaaccattttgattatgtgaaccccgccgcgccaaaaggtgggcagataacgttgagtgccctcggcaccttcgataatttcaaccgctatgcactgcgcggcaacccgggcgcacgcaccgagcagctgtacgacacgctatttacgacttccgatgacgaaccaggcagttattacccgctgattgctgaaagcgcacgctatgctgacgattattcctgggtggaggtcgctattaatccgcgcgcccgttttcatgatggtagccccattactgcccgcgatgtagagtttacttttcaaaaatttatgaccgaaggcgtgccgcaatttcgtctggtctacaaaggcaccaccgtcaaagccattgcaccgttaaccgtgcgcattgagttagctaaacccggcaaagaagatatgctgagtctgtttagcctgccggtatttccagaaaagtactggaaggatcacaaacttagcgacccgctcgccacgcctccgcttgccagtggtccgtaccgcgttacgtcctggaaaatggggcaaaatattgtctattcccgtgtgaaagattactgggcagcaaacttaccggtaaaccgtggacgctggaatttcgacaccattcgctacgattattacctcgatgataatgtcgcctttgaagcgtttaaagcaggtgcctttgatttgcgtatggaaaacgacgccaaaaactgggccacgcgttataccggtaaaaatttcgataaaaaatacatcatcaaagatgagcaaaagaacgaaagtgcccaggatacgcgttggctggcgtttaatatccaacgtccggtattcagcgatcgccgggtccgggaagctatcactctcgcctttgactttgaatggatgaacaaggcgttgttttacaatgcctggagtcgcacgaacagttattttcagaataccgaatacgcggccagaaattaccccgacgccgcggagctggtgcttctggcaccaatgaaaaaagatctaccgagtgaagtcttcacacaaatctaccagccgccggtatccaaaggcgatggctacgatcgtgacaacctgttaaaagccgacaaacttctcaacgaagcgggctgggtgctgaagggtcagcaacgcgttaatgccacaacgggtcagccactcagctttgaattattgcttcccgcaagcagcaatagtcagtgggtattgccgttccagcacagcctgcaacggctgggtatcaacatggacattcgcaaggtggataacagccaaatcactaaccgcatgcgcagtcgcgactatgacatgatgccgcgcgtatggcgggcgatgccgtggcccagttccgatttacagatttcctggagtagcgaatatatcaattccacttataatgcccccggcgtgcaaagcccggttatcgacagcctgatcaaccaaattattgccgcgcagggaaataaagaaaaattactgccgttggggcgagcactggatcgcgtattaacgtggaattattacatgctgccaatgtggtacatggcggaagaccgtctcgcctggtgggataaattctcccagccggccgtgcgccccatctatagcctcggtatcgatacctggtggtatgacgtcaataaagcggccaaactgccgtccgccagcaaacagggagagtaaatgggcgcttacctgattcgccgtctgttgctggtgatcccaacattatgggcgattatcaccatcaactttttcatcgtgcaaattgcgcctggcggtccggtcgaccaggccatcgccgccattgagtttggtaatgccggagtattacccggcgcaggcggtgaaggtgttcgtgccagccatgcgcaaacgggtgtcggcaatatcagcgacagtaattaccgtggcggacgcggattagatccagaagtgatcgctgagatcactcatcgctacggttttgataagccgatccacgaacgttacttcaaaatgctctgggactacatccgctttgattttggcgatagcctgtttcgcagcgccagcgtgctgacgctgattaaagacagtctgccggtttccatcaccctcggattgtggagcacgctgattatctatctggtgagcattccgttaggcattcgcaaagctgtttataatgggagccgctttgacgtctggagtagcgcatttatcatcatcggctacgccattccggcctttttgtttgccatcctgctgattgtcttcttcgcgggcggcagctatttcgacctgttccctctacgcggcctggtttccgctaactttgatagcctgccgtggtatcagaaaatcaccgattatctgtggcatatcacgctgccggtgctggcgacagtgattggtggctttgcggcgctgaccatgctgacaaaaaacagtttccttgatgaagtgcgcaagcaatacgtggtgaccgcgcgtgcgaaaggggtaagtgaaaaaaatattctctggaaacatgtgttccgcaacgccatgctgctggtgattgccggttttccggcgacgtttatcagcatgttttttaccggcagcctgctgattgaggtgatgtttagtctcaatggtctgggcttactgggctacgaagcgaccgtcagccgcgattatcctgtaatgtttggtaccttgtatattttcaccctgattggcctgctgctgaatattgtcagtgatatcagctatacgctggttgatccgcgtattgattttgagggacgttaatgagccgactcagccccgtcaatcaggcccgttgggcgcgttttcgtcataaccgtcgcggctactggagcttatggattttcctcgtcttgtttggtttgagtttgtgttctgaacttatcgccaacgataaaccgttgctggtgcgttatgacggcagttggtatttcccgttattgaaaaactacagcgaaagcgattttggcggcccgctggcaagtcaggctgattatcaggacccgtggctgaaacaacggctggaaaataacggctgggtactgtgggcaccgattcgctttggtgctaccagtatcaactttgctaccaataagcccttcccttctccaccctcccggcaaaactggctgggaacggatgccaacggcggcgatgtgctggcacgcattctctatggcacgcggatcagcgttctgtttggcctgatgctgactctctgttccagcgtgatgggcgtgctggcgggggcgctacaaggctattacggcggtaaagtcgatctctggggacaacgctttattgaagtatggagcgggatgccgacgctgtttttgattattttactttccagcgtcgtacagcctaacttctggtggctgctggcaattactgtcttgtttggctggatgagtctggtcggcgtggtgcgggcggagtttttacgtactcgtaatttcgactacattcgtgcggcacaggcgcttggcgtcagcgatcgcagtatcatcctgcgtcatatgttgcctaatgccatggtcgcgaccctcacctttttaccgtttattttatgtagtagcataaccaccctgaccagcctcgatttcctcggcttcggtctaccgctcggtagtccgagtctcggtgaactgctgttacaagggaaaaataaccttcaggccccgtggcttgggatcaccgccttcttgagcgtggcgatattattgtctttgctgatctttattggtgaagccgtccgcgacgcatttgatcctaataaggcggtgtaacatgacgcaaactctgttagcgattgaaaatttgagcgtgggttttcgccatcagcaaaccgtacgtacagtagtcaatgatgttagtctacagattgaggctggcgaaacgctggcgctggtgggtgagagtggtagtggcaaaagcgttaccgcgctgagtattttacgcctgctcccttccccgccggttgaatatctctccggcgatattcgttttcatggcgaaagcctgcttcacgccagcgatcaaacgttgcgcggtgtacgcggtaataagatcgccatgatttttcaggaaccgatggtgagcttaaatccattgcataccctggaaaaacagctttatgaagtgcttagtctccaccgcgggatgcgtcgggaagcggctcgtggcgaaattcttaactgccttgatcgcgttggtatccgccaggcggcaaaacggctgacagattatccgcatcagctctccggcggcgaacggcagcgggtgatgattgcgatggcgctgttaacgcgaccggaattattaattgccgatgaaccgaccaccgcactggacgtctctgtccaggcgcagattttacagctgttgcgcgaactgcaaggcgagctgaatatgggcatgctgtttattactcataacctcagcattgtcagaaaactggcccaccgcgtggcggtaatgcaaaacggtcgctgtgtcgagcaaaattacgccgctacgctatttgcaagtcccactcatccttacacacaaaagctactcaacagtgaaccgagtggcgatccagtgccgttgccagaacctgccagtacgttgctggatgttgaacagcttcaggttgccttccccattcgcaaagggattttgaagcgcattgtggatcataatgtggtggtgaaaaacatcagttttacgctacgagcgggtgaaacactgggtttagtgggcgagtccggttccgggaaaagtacgacgggactggcgctgctgcgactgattaattctcagggcagcatcatctttgacggtcagccactgcaaaatttaaatcgccgccagctgttacctattcgtcatcgcattcaggtggtatttcaggatccaaactccagcctcaacccacgactcaacgttttgcagattattgaggaaggcttacgggttcaccagccgacgctttctgccgcacaacgcgaacaacaagtgatagccgtgatgcatgaagtgggattagatcctgaaacacgccaccgttatccggcggagttctctggtggtcagcgacaacgtattgcgattgccagggcattaattcttaagcccagcctgatcatacttgatgaaccgacaagtagtctcgacaaaacggtacaggcgcaaatattgacgctattgaaaagtttgcaacaaaagcatcaactggcctatttgtttatcagccacgatttgcacgttgtccgcgcgttatgtcatcaggttatcatactgcgacaaggggaagtagtggaacaaggaccgtgcgcgcgcgtgtttgccacaccgcagcaggagtatacgcgtcagctactggcgttgagctgacgcttaaaaaggattgtagttactaaagggttcggcaattgccacaccaaaatttttcaatcggcatgttgcagcaaactcgtcctggcgatttacaaacaggcacggctcaccttcacactccagcacgctacatggaacttcgatgtcgcttaacgcctggcttagtttatacatcacgctccatgcattatcaccatccgggctaagcaatttaagcgccaccaggctgttgtcaccgcacggtccattttgcggaatcggttcaaccttgctacctgcgaaaccagcagaccagcgatagttctgcggcagtcgatggacgatactgagttgtaaactagtcacttattttccccggaagcacattcacttcacaatttgtttacatcaattttaacacatcatcaacaatccgtctttatacagatcgtaaagattgatgcctcgcctgcgtggcctctatggctctgatttaagtaatatctgcgggcgtggtcacgtttgcggggctatatgtacccgtttctgcgatctaactcaacctttttaactacaatgatgtgactttttacataaattgattttacataaaataaacatatatcgggggaatgatagatttgtggttgacatgcatcaacaaaggaagccttttagcttcctcgttgtgcaatagatcaccgttttttcggccgactggcgtacagacagaagagaatggagctggttgcgcagaatgcaatactccaaatcatcggccatgcagagttaaaggtcgcaagagaaagcaatgcgccaacaattgcccctatgccaaaacggaaggttcctgccaggctagatgccgttcccgccatatggggaaactcatcaagaatgaccgccatcgcattggaactcaccatgctcacgcagcccacaaacgccgcaacgccaaccaccaggctccaaaatcccagccccagcagcgcactgatgaccatccacgctgccataataaattgtatccacaacccgctgcggaacatatttaacgcgccaatgcggcggacgaagcggctgttaaagatggtcatcacgaacagaaaaacaatgtttagcgcaaagtaataaccaaagttttccggcgcgacgtggttaatttcaatataaacaaacggtccggcgcttaagaaactgaacatcccggcaaagctgaaaccactggcaagcatgtagctcaggacacgtttatggcggaacagcgccgcaaagttaccaatagtggtacgaatgtgaaatggctgacgacgctccggtggtaaggtttctttaatcaggaagaaaatcattgcgctagccagaatcgccgctaatgccaggatccagaagatgtaatgccagctcagccacaccagcacccagccgccaactatcggtgccatcagcggtgcaatggttgtcaccagcatgacaaagctcatcatccggctgaactcttctttcgggtaaatatcgcgcatcagggcgttaatgaccacgctggccgcagccgcagccagcccgtggaagaaacgcatcacaatcagctgatcgatggtgtttgccaacgcacacgccaccgcggcggcggcaaacaccagcgtaccgccgagcaccaccggcttacgcccgaagctgtctgccatcggcccgtagattaactgccccaacgcaaagcccagaatataagtactgagggtcatctgcgtactgcccgccggtacgccaaactgcgcactaattaccggtagcgcgggcagatacatatcaatgctcagcggcatcaacatggccagcaggccaaggataaaaacaatagcaaagctgctatgctgtcgggtggtcacaacgggctcctgaaagtcattgaaaagttagacgacgctggcaatttcttcttcagttaacggacgatattcaccgggggctaaatcagcatccagcgtaataccgccaatacgttcacgatgcagctcaaccacgtggttacccacggcggcgaacatgcgtttcacctgatgataacgcccttcgctgatggtcagacgaacctgcgttggggtaatcacttccagcaccgcaggcttagtgagatctttttcgttatgcagctgcacgcctttagcaaattgctctgccgtatcgtcagctacaggactttccagtgtcaccagataggtcttctcgcaatgatggcgcggagaagtaatgcggtggctccactgaccatcatcagtcatcagcaccagaccggtggtatcaatatccaaccgccccgccgcatgcagtttccacgctaccggttcatcaagaaaatagagcaccgttgggtgatcagggtcgtccgtggagcaaacatagccctgaggcttattgagcatgaagtaacgtggaccgtgttgctgcgccagcgggttgccatcgtaagcgacatcatgttcaggaagcagtttgaacgctgcattacggacgatttcgccatcgacggtgacacgattgccgcggatttcacgcccggcaatagcacggctaacgccgagttgctgtgcgataaatttatcaagtcgcatgtgtgtgattttgcctgtaaaaacggaggtcgggcattgacccgaaaatctgaactgttgtctgcccagtatagcggtctaataacatccctcaagggaaaaagatccatggcatactattagcagaataatctacctacgcgagaccatgatttttacacttcgcccatatcagcaagaagccgtggatgccacgctcaaccattttcgtcgtcataaaacccctgccgttatcgtgctgcccaccggcgcaggtaaaagcctggtgatagcggaactggcacggctggctcgtggtcgcgtgctggtgctggcacacgttaaagaactggtggcgcaaaaccatgcaaagtatcaggcgctggggctggaagccgatatttttgccgccgggctaaagcgcaaagagagccacggtaaagtggtatttggcagcgtgcagtctgtcgcccgtaatcttgatgcctttcagggtgaatttagcctgttgattgtcgatgaatgtcaccgtattggtgacgatgaagagagccagtatcagcaaatcctcactcacctgacaaaagtgaatccccacttacgcctgctggggctgactgccacgccttttcgattgggcaaaggctggatctaccagtttcattatcacggcatggtacgcggcgatgagaaagcccttttccgtgactgcatttatgagctgccgctgcgttatatgattaaacacggctatctgacgccgccagaacgactggatatgccagtagtgcaatacgatttcagccgcttgcaggcacagagtaacgggctgttcagcgaagccgatctcaaccgtgagctgaaaaaacaacaacgtattaccccgcacatcatcagccagattatggagtttgctgcaacgcgcaaaggggtgatgatttttgccgcgacggttgaacacgcaaaagagattgtgggattactgcctgccgaagatgcagcactgattactggcgacacccccggcgctgagcgcgatgtgttaattgaaaattttaaagcccagcgttttcgctatctggtcaacgtcgcggtactgaccaccggatttgacgccccgcacgtcgatcttatcgccattctgcgccctaccgaaagtgtgagtctttaccaacaaattgtcgggcgcggtctgcgtctcgctccgggcaagactgattgcttaattcttgattatgcgggtaatcctcacgatctctacgcgccggaagttggtacaccaaaaggcaaaagtgacaacgttccggtacaggttttctgccctgcctgcggttttgccaacaccttttgggggaaaacgaccgccgacgggacattgattgaacactttggtcgtcgctgtcagggatggtttgaagatgacgacggtcatcgcgaacaatgtgacttccgtttccgttttaaaaattgcccgcaatgtaacgcggaaaacgatattgccgcccgccgctgccgcgaatgtgacaccgtactggttgatccggacgatatgttaaaagcggcgctacgactgaaagacgcgctggtattacgctgtagcggcatgtctttgcaacatgggcacgacgagaaaggcgaatggttgaaaatcacctattacgatgaagacggcgcggatgtgagtgagcgtttccgtctgcaaacacctgcccagcgtaccgccttcgagcagctttttatccgcccgcatacgcgcacaccgggcatcccgctgcgctggatcaccgccgccgatatcctcgcccagcaagccttattgcgacacccggattttgtcgtcgcccgcatgaaaggccagtactggcaggtgcgtgaaaaagtgttcgattacgaaggtcgttttcgtctggcgcacgaattacgcggttaatggtagttttgattgatgtataaggcgattgagtatagaatctcgcccgcttttgcatacgcaaagcagatcacttacctgttgctgggtcgcctgtagcaggattaatttaagagagaaagaaatgtttactatcaacgcagaagtacgtaaagagcagggtaagggtgcgagccgccgcctgcgtgccgctaacaagttcccggcaatcatctacggtggcaaagaagcgccgctggctatcgagctggatcacgacaaagtcatgaacatgcaagctaaagctgaattctacagcgaagttctgaccatcgttgttgacggtaaagaaatcaaagttaaagctcaggacgtacagcgtcacccgtacaaaccgaagctgcagcacatcgacttcgttcgcgcttaattgctgaataagttgtaaaaaaccccgctccggcggggttttttgtatctgcagattatgcctgattacggtattgctattttttgcaggccagataaggcgttcacgccgcatctggcattcagaacacaaaaccgattaattgccgccagacgtccggcgctgcaattggtcgcgcaaattcggcggcgtgcctttaatggtcaaggtatcggttgctggatcccagaagatgcgttcacctaacagcatcgcatcaaagttaatagtcaagccaccgccgctaccggcaaacttcgtcaactgacgcagtgtgctacggtctgccgggaagctctcttccagttcgtagcctttttcagccgcaaactccgtgaagctcacttcgcttacgcctgccagctctttgctcaggcttttcagttcgatctcttcgcctgcctgcagctgctcattacagtagctataaacctgctggcgcacgttctgtcgctctgctttatccagttgtgcttcggcagtgaaatcatcaaccgcttgcaacagcccacggttttgcgctttcgcgtttaacccttcgctggccccgaggaaatccataaagaaatccgccactttgcgccctactcgccctttcaggaaagtgagatagcgggtggactctggattggtttcccattcggttaaatcgatacgcgcaacaatatccgcatgattgatatcaagataatgggttgggttgatgtcgagattttcgttaacgcgcatactgctcaggttgctcagaactgccaccagcaaatactccaccgccagatagcgatagtggcaaaacagcacgaatccaccgtcagcaaaaggatatttcgctaattcgtcacgcaggcggccggttgccgcgcggctaaatgccaggaagtcctcttcgccctgacgctgtaagcgcagcgtctgcgccagttcactctcttcgctaaacaagccgtaagctttatttttggcgctatagacccgatgcagttctgccaccatctcaacgacggtttctgtcggttccagcaaactatcgcgcaacaccagctcaaggttctgctcatcacgcttgataagctggtgcagagcaatctggttgatatccagactcatgataaactctcctttaagaccgggcggtattcaaccaccgccggttaagcgacgcaataaaagatggcggtcattttacagaaggcagcgtaacgagaatgatttaacgcataaaaaagcagaaaaaaaaccgttgctacggtaatatgttgccctttcatcaactaactgatttcgatttatgccacaaatttcccgctacagtgatgaacaggttgaacaattgctcgcagagctgctcaacgtactggaaaaacataaggctccgaccgacctttccctgatggtgttaggcaacatggtcactaaccttatcaacaccagcattgccccggcccaacgccaggcaattgccaactcttttgcccgcgccttacagtcctctatcaacgaagacaaagcgcactaagggaaacagataacaggttatggtaactcatcgtcagcgctaccgtgaaaaagtctcccagatggtcagttgggggcactggtttgcactgttcaatattctgcttagcctcgtcattggcagccgttacctgtttatcgccgactggccgacaacgcttgctggtcgcatttattcctacgtaagcattatcggccatttcagcttcctggtgttcgccacctacttgctgatcctcttcccgctgacctttatcgtcggctcccagaggctgatgaggtttttgtccgtcattctggcaacggcgggaatgacgctattactgatcgatagcgaagtctttactcgtttccatctccatcttaatcccatcgtctggcaactggttatcaacccagacgaaaatgagatggcgcgcgactggcagctgatgttcatcagcgtgccggttattttattgcttgaactggtgtttgcgacgtggagctggcaaaagctgcgcagcctgacgcgtcgtcgacgcttcgcgcgcccgctggccgcattcttatttatcgcctttatcgccagccatgtggtgtatatctgggccgatgccaacttctatcgcccgatcaccatgcagcgcgctaacctgccgcttagctacccgatgacggcgcgacgttttcttgagaagcatggtctgcttgatgcgcaggagtatcaacgccgtcttattgagcaaggtaatccagacgccgtttccgttcagtatccgttaagcgaactgcgctatcgcgatatgggcaccgggcagaatgtgctgttgattactgtcgatggcctgaactacagtcgcttcgagaagcagatgcctgcgctggcaggttttgctgagcaaaatattagcttcacgcgccatatgagctccggcaacactacagacaacggcatctttggcctgttctatggcatcagcccgagctatatggacggcattctgagcacccgtacgcctgcggcattaattactgcgcttaatcagcaaggctatcagctggggttattcagtagtgatggctttaccagcccgctgtatcgccaggcattgttgagtgatttcagcatgccgagcgtacgcacccaatccgacgagcagaccgccacgcagtggatcaactggctgggacgctacgcacaagaagataaccgctggttcagctgggtttctttcaatggtactaacattgacgacagcaatcagcaggcatttgcacggaaatatagccgggcggcaggcaatgtcgatgaccagatcaaccgcgtgctcaatgcactgcgtgattctggcaaactggacaatacggtggtgattatcactgccggtcggggtattccactgagcgaagaggaagaaacctttgactggtcccacggtcatctgcaggtgccattagtgattcactggccaggcacgccggcgcagcgtattaatgctctgactgatcataccgatctgatgacgacgctgatgcaacgcctgctacatgtcagcacacctgccagcgaatatagccaaggtcaggatttgttcaaccctcaacgccgtcattactgggttaccgcagcggataacgatacgctggcaattaccaccccgaaaaagacgctggtactgaacaataacggtaaataccgcacttacaacttacgtggtgaaagagtgaaagatgaaaaaccacagttaagtttgttattgcaagtgctgacagacgagaagcgttttatcgctaactgattaattataaatcagttagcgaaatatcttacttgcaatcggtgtggaaaacggtagtattagcagccacgagtcggcacgtagcgcagcctggtagcgcaccgtcatggggtgtcgggggtcggaggttcaaatcctctcgtgccgaccaaaaatcccaagaaaaaaccaacccttacggttggtttttttatatctgcaattaattcgataaacagaccgtgacacatcacagcctgtttattttctgttatcagaacgtcctgagctttcatcctatgaaattaattgctgttaaaagcattgggtacagaaaatacccatagctccatacccggagtcagtttttaaaaactgtttaaagaaatgcacaagtattgtgattgattttttagttgtttttcttgatgagaagctgatgcaaaattccgtctttataatgaaaatgatgccaaagcgaacgacaaggttgtagttttcactacatgtccatacataaaatggggtaacattcacgcgcctggtagcgttaccaacgctacgctcaaacataatgattctaataaaacctcaggagactactatgcctgaagcaacaccttttcaggtgatgattgtggatgatcatccacttatgcgacgcggtgttcgtcagttactggagcttgatcctggctctgaagtggtcgccgaagcgggcgacggcgcgagcgctatcgatctggcgaatagactggatatcgacgtgatcttgctggatctcaatatgaaaggtatgagtggcctggatactctcaatgccttgcgcagggatggcgttaccgcgcaaattattatcctgaccgtatccgatgcctccagcgatgtctttgcgctgatagacgcaggcgcagacggttatctgttgaaagacagcgacccggaagtattgctggaagcgattcgtgccggagcgaaaggcagcaaagtctttagcgaacgcgtcaatcagtacttacgtgaacgtgaaatgtttggcgcggaagaagatcccttcagcgtgctgacggagcgcgagctggatgttctgcacgagctggcacaggggctgagtaataaacagattgccagcgtgttgaatatttccgagcagacagtaaaagtacatattcgcaatctgctgcgtaaactcaatgtccgcagtcgcgtggcggccaccattctgttcctgcaacaacgcggggcacaataaaaatagcccgatggatttatcatcgggctgagatttatgacaaacgcaaaactgcctgatgcgctacgcttatcaggcctacgtggatcgatcaatttattgaatttacacaattttgtaggccggataaggcgttcacgccgcatccggcataaactaagcgcactttgtcaacagtctagcccgatggcatcaccatcgggcctctttttatttactctcctgcgggctcaaatgttgcatcgcctgcgcgatactacgttcaatcaccgcacggcgagtatcgttggcaggtaagagtttcaacatcatctcccacgcggcaacggcttcgccaaatcgctgctgctcaaaggcattaaacgcatacatgcttagcacacggatattgctatggtccgttctcaccagctgacgtagcagttcaccgccgaggcggttgtcgttgggatcagaactacgagtcaacgcttcagcgtatcccagtgcagcatcactgtttttcggatcgaggcgatacgcagtggcgtatgcatcggtggcgatactggcgttacccagcgccatgccaacgcggcccaacataatccagccttctatatctcccggatttttttgcagttgagtacgcatccccagcgcaagacggctcatctcttcttcgttgagcggatcggctttcggatccagcgccctgtccagcaacgccggagcctgtgccgtggcctgctgccagattttcacctgctgataattgccagtctggtagtagctgacgccagccacaattaacgccaccacaatacccggcagataaacaacatatccggcacgcttaccttccggcacgctttgttcaggaaacgcttccggcaccacgcgtacccgacgccggctgcgggcgtatatgacccaaccgccaatgccaatagccactactggcagcacccacagcagcacggtcagcggcgttaacggcggatcgtaagtgacgaagttgccgtaacgcgccaccatataatcgacaatctcttttttacttttaccttcctgcatcagttcatacactttctgacgcaggtcggtggcaatcatgctgttggaatcggcaatgctgttgttctggcatttcgggcagcgcagttcttcagtgagctgacggaactgttgttcctgtgcttcatctttaaactgcaacacatcgatggtcgccagcgcactgccggagatcatcagcatcagcacgcccaataaaaacctcattgtgcggcctccttactgtatttctcccacagcggcttgatctcttcttcccagacgcgaggattcagatcgcccgcatggcgatagcgaatgatgccgttgccgtcaataagaaacgtttctggcgcgccatagacaccgagatccagccctaacatgccatcgccatcaaacaggcttagcgcgtaaggattgcccagctctttcagccagctgattgccttctggcgatcgtctttatagttcatgccgaccacgcggatgccctgcgcagaaagctgattcagatattgatgttccgcacggcaggtcggacaccaggtcgcccagacgttaagcagtactggtttgccctgagtcagcacatccgcctgataaaactgccccggattgtccagactttcgagacgaaacttcggcacaggcttgccaatgagcgcgctttccagattggtcggatcatccccttcggcattacgcgccagctgccacagcagcgccgcggcaatcgccaggaagataatcaacggaattaacaatactttgcgcttcatacggcctccggcgcagttttttgcggactcacgcgcttacgatagcgaggatcaaacagacacagcagtccgcccaacgccatcatcagcccgcccgcccaaatccagcgaacaaatggtttgtagtaaagacgcacggcccacgcgccgttttccagctcttcaccgagggccgcgtacaggtcacgcgtgatgccgccgtcaattgccgcttcggtcatcatgctcccggcagtgttgtaataacgtttttccgcatacagcaccgtttccggcttgccatcgcgcgttacgccgatagtcgccacaccgccacgccagttcgggccagtcacctctttgacatcacggaaggtgaagcgatattcatgaatatcgacgctatcgccggacttcatgcgcacatcacgctcaacgctatagttctggctaaaggcaatgccaacaattgtcactgccagcccaaggtgagccgccaccatcccccaataactgaaggtggttttcgtgccgcgactaatacgtagcgcagcttccgcaattgccagcaccgcaatccagcaggccattgccaggccgagcaccgtcatcgccacaactttgctttcgaacagccacggcaacagcaggctcagcaccagcgtagagatgaaggcgataatcaataaattgcggatcttacgcgggcgatcccgcccccagcgcaccagaggaccgacaccaagcagtagcgcaaacggcaccatcagccaggtaaacatggtgttgaagaacggttcgccaatgctaatactgcccagtcccagttgcttatgcaccaacggcagcagcgtccccagcaacaccaccagcatcgcagcgaccagcaaaacattgttcgctaacagcaaagattcccggctccacagcgcattgtttacgcgactgcgaactttgtgtccacgcgcggcaaacagcagcaggctaccgccaatcaccagcaccataaaggcgaggataaacataccgcgcgccggatcagacgcaaacgcgtgtacgcttaccagcacgccggaacgcacgaggaaagtccccaacagacacaagctgaaggcactgattgccagcagtaatgtccacgctttgaagctggcgcgttgttcagtgaccgccagactgtgcatcagcgcagtccccaccagccacggcataaagctggcgttttctaccggatcccagaaccaccagccaccccagccgagttcgtaataggcccatgcggaaccgagcacgatgccgagcgtcaggaagatccacgctgccagcgtccacggacgagtaaaacgcgcataagtgctgtccagacgcccgctcagcaaagaagcaatggcaaaagcaaacgccacgctgaaacccacgtaccccatataaagcagaggcggatggaagatcagccccggatcctgcaatagcgggttaagatcgcgaccttcaatcgggaagttcggcaacgtgcgagagaacgggttagaggtaaagagaatgaacagcaaaaagccgacactgaccatccccattatcgccagtacacgggccacaatatccagcggaatacgctgactaaaaatcgccaccgcaaaggtccagccgctcatcagcagcacccacagcagtaggctgccttcatgcgcgccccaggtagccgccacgcgataccacaccggaagctgggtattggagttgctggcaacataggtgacggtgaagtcgttgaccacgaaagcattgaccagcaccagaaatgcgccagccacagacataaacagcagccaggcaaacaagcgggaagacgccatcatgcgcgcatctccgcgcgccacgccccatagcggatacacggacagcagcagcgcaattcccagcgccaggcacagcagtccgttaccaatttctggcatcatgatgctgggtccttataaacttacgtcaacttgctgggtccttataaacactcgccgggcgacggtggttagcttccatcgctttctcaacttctggcggcgtatagttttcatcgtgtttcgccagcacttctttcgcgaggatatgattgcctttttccagttcgccctgcaccacaacgccctgcccttcacggaacagatccggcaaaatgccttcgtaagagacatccacactgccttcagcatcgtaaatggtgaaggtcactttcaggctattgggatcgcgctgcacactacccggcatcaccatcccgccaacgcgcagacgctgaccgacttccggcatttgctgagtttcacgcttgccgtagagaatttcccccggcgtataaaagagatcgatattgctgcgcagcgcatatagcaccagaccgatagtcagcgccagccctgccaacacggcacaggcaatccacaagcggtttttacggcgaatattcatgcagcctcctgctgttgcgcagcacgtaaacgcgcctcacgcgcccgctgttgcgccacgccacgcagaattgcgcgatgttgcatcacgctgtgcacgaccaaaaccaccagcggaataacggtcatcaccaccgccagccagacaaaaaaggcgtaaccgcccattgcgaaaaattcattccaggaagcaaatgcaggggtcatttacggcctcttttcagtatcagttcactcacccacggacggcgtttttccatcagcaaaatcaaattacgcatccgcatcagcgtcagcgtggcagacaggagcaggaagccaaaaatgctccagcgcagcgggctacgcatcgccggatcgatactttgctgcatccgcgtacttccctgatgcagggtgttccaccactccacggagtaatgaataatcggcagattcaccacgccaatcagcaccaggatacctgccgcacggcccgccagacggcggtcgtcgaaggcgtgccacagggcaatcacacccacatacaaaaacagcagcaccagttcagaagtcagacgtgcatcccatacccaccaggtgccccacatcggttttccccatgcagagccggtaaccagggcaataaaggtaaacacggcaccaatgggggccatcgccgccaccgccaggttggccattttcatctgccagacaaggccaataaacgctgccactgccatacttgcataaatgcccatgctccagatcgccgcaggcacatgcaggtagataatgcggtagctatttccctgctgataatcagccggagcaaagccgaatccccagatccagccgacggtaagcacgaccacactggcaattgccagccacggtataaaccagccacagatttgatacagccgtggtgggatcgccagttgatgcagtgttttccacatagtttcgataccagactcgaacaaaaatcagtaatccagcgttattgaatgctgattcgtaacgctgccgccgtcgcaaaaggacttaatgtcgcggtgcctgccagcaacgcgcctaaaattgccagatacccgtcaacgggcaaatgcatagaagccgcgtccatcgcggcggtggcaaagatgagtaatgggatagtcagcggtaacaccagtatgctgagcagcacaccaccgcgcttaagtcccactgtcagcgccacgcccggtgcaccgagaaagccaagcgtaggcgttcccagcagcagcgtcagcgccatcacttgccagccataaacatccattcccagtagcattgctaccagtgggctaaggatgagtaacggcagaccggttaccatccagtgcgccatcaccttcgccagcacaacggcgggcaagggtaacggcaacaacatcaattgttcaagactgccgtcctgcaaatcgtcacggaacagtcgttccagcgccagcaaggaactaagcagcgcagcaacccagataatgcccggtgcaatacgcgccagcagttgcggctccggaccgatactgagcggaaaaagggtaattacaatcaggaagaaccacagcgggttggcgatttcggcgctatggcgaaacgctacacgcagctcaagacggaaaatgcgccagaacatcatgcggccctcgtttgcgtcagactaatgcggcgaattttactttcagcaacgttgagcggctggtgggtagtcagaatcacaatccccccctgctccgtatgctgcgccatacgctgggtcagacgatcgacaccgttaacgtcaatcgcggtaaaaggctcgtcgaggatccataacgtggcacgggtcagccacagacgcgctaaagcgacgcggcgttgttgcccggcgctgagctgatttacaggaatatcttcgaatccggcaagcccggcctgcgccagggcttccagacattgtgcggtatcgccatcgcgatgataaaagtgcagattttctaacgccgtcagccgggttttgatccccggctgatggcctatccataacaggttttgatggtagctgtcgcgtacctgatgcaagggctgcccttgccagagaacctcgcctgcgtcagggcgagacaaccccgtcagcaaacggagaagcgttgtcttccccgcgccgttgctaccggtgatttgtacccactctcctgcgttcagcgtaaaactcaagccactaaataaggttcgttcatcccgctcacaaagtaactctctggcttcaagcatacccacgcaataaccctgttaaaaacctggctcgacttcacgcatatcgggcagcttgtgcgctatccctttatggcaatcaatacaggtttgcccatctttcaccgcctggtcatgcatcttcgcggcaacgcttttctgggcggttgtatccatatactcgaagttgtgacagttacggcactcctggctgttattgtccttcatgcgccgccactcattctgtgccatcgtcagacgatgagcttcaaatttctgcggcgtgtcaataacgccaaaaattttaccatacagctctttacttgctttgagcttgcgtatcatcttcggcacaaactcgtgcggaacgtgacaatccggacaggtcgcacggacgccgctacggttgttgtagtgcacggaatccatgtattcctgatacaccgtgttgcgcatttcgtggcagctaatgcagaactcttcggtattggctttttccatcccggtgttaaagccaccccagaagacgatgccgccaacaaaaccgatcaacagcagcgtccccagcgccagacggctgggggtacgccaccatttccacaggcgcttaatcagaccaggcttacggtcagaatttcccataataacctcttatttcccgtaacctttacttggggtaaaggtattccccacgattggcgcggtatcggcctgcggtacgtgacattgcagacagaaataacgacgcggagccacttccgcgcccactttgccgtcgctgtccataaagtgagtaggactgatacgcggcgcgccagtggtgcgatagctttcgacaccgtggcactgcaagcagcgattggtattggtcgttacctgataaccttcaacgctatgcgggatcattggcggctgattcacatagttcagcggcatccgatcctgctcttttggcatccgaatggccccttcctgtgtcccggatacttccgggctctggctaaaatcgacgccattagccgcccaaaccgcgccgcttaccaccagggccagcatcgccgtccattgacacagcgctttcttcaggtcatggcttttcatgatttcgctcccgaactccattatgtcaacttttcgctccgctactccatcgtgtagttattgtaaatacatcctcagaacagacatccacgcagcgaccgcacgtcatgcaatcgcggctggtgacctgcaccgggctttgttcatccagcaccggggcacgtagcacatgcggttccgggcaaacatgaaaacaatccatacagcggttacatttctgccgatcggtggccgcaacggtaatcacacctttgctacccagcacgccatacagcgcgccaaccggacaaatgtgcccgcaccagccgtgttcaacgaccagtagatcaaataaaaacagcgcgagaataagcagcgcgccgctgccgaagcccattaccaggctacgccccatcagagaaacggggttgatccattcccaaatgagcgtgccagttaaggcacttcccaccagaatgaccaccaacagcacgtagcgaatgtggcgagggatcgtcgcagactgattgaggtcaaagcgcctgcgtaaccagttcgctaagtcggtaatcgggttcagcgggcagacccagctgcaaaataatcgctttcccgccagggcgtagagcacggtgataatcaccgcaccggtcaacgccaccgtggcaggcagatgaccactggcaagactttgcagcgtcatcagcggatcggtcagcggaacggtgtcgaataacaggctactgctgtagttgccgtgcaagatccacacaccaaaccatggaccgctcaaaaacatccccagcacgaagaactgacaaaggcgacgtaacaccagccaacggtgactgcgccaccagccttttttctccagcgcctcgcgcccggcgtcacgtttacgatttgccattgttcccctccagccagccgttacttagcttttgccattgttcccctccagccagccgaagcggtaatggtgacctaactcccctttcgccagactcagcggtaacaccttgattgccggttgttccagcacgcatactttttcgcacttaccgcaaccggtacaggcgtcgctgtgaaccgtcggcagaaagcgggcgtgcttaccggtacgcgtgttgcgctccagctccagggtgatggcctcatcaattttcgggcattcgcgataacaaacatcgcagcgcagcccctgaaagttgagacagttttcctggtccaccagtaccgccagccccatccgcgcgtcgtcgatgctttcaatctcacgatccagcgcaccgcttgggcacactttggcgcacggaatgtcctcacacatttcgcaaggaatatcccgtgcgacaaaatatggcgtgcccgcgctcagaccagaggccagcgtcgccagttttaaggtgtcgtaagggcaagcctgaacacactgaccgcaacgcacacaggcactggcaaaggcgttctcgtttatggctccgggcgggcgcaaccgcacgccagatgcgcgtgcggtttgctgttgtaaccccagcgccacacccacggcagccagcccgcctgctgtgcgaacgacatcgcgcagaaagcggcggcgaccattttgaggtttcgcactccgggacataatggcttacaccttctccagtttgaccgcgcacttcttgaagtccgtctctttgctgagcggatcggtcgcatccagcgtcagtttgttaaccaactgtgcggcgtcgaagaacggcatgtacaccaggccctgtggcggacggttacgaccgcgcgtttcaacaatgctgatcacttcgccacggcgagaaaccactttcactttgtcgccacggcgcagatcgcgcgctttcgcatccagcgggtgaataaacaggaccgcttccgggaaggcgcggtgcagttctggtacacggcgagtcatactgccggtgtgccagtgctccagaacgcgtccggtagagagccacaggtcgtactcttcatccggtgcttccgccgccggttcgaatggcagtgcgaagatcaccgctttgccatccggtttaccgtagaacttatagccttcgcccgctttcacgtacgggtcgttaccttcgctgtaacgccactgcgtttctttaccgttcaccaccggccagcgcagaccgcgcgctttgtggtagtcatcgaacggtgccagatcgtgaccgtgaccgcgaccaaaccatgcgtactcttcgaacagccctttttgcagatagaagcccagctcgcgggattcatcgttcagctgatcttccgccagttcggataccgggaatttgctcacttccggtgtggcatacagcacttcgtacagcgttttgccacgcagttccggtttcttcgccagcagatcttccggccatacttcttcagttttgaagcggcgggagaactggactaactgccagagatcgcttttcgcttcgcccggtgcctgtacctgttgacgccagaactgagtacggcgttcggcgttaccgtaagcgccctctttctctacccacattgcggtcggcaggatcaagtcggcggccagcgcactgactgtcggatacggatcggagacgatgatgaagttgcgcggatcgcgccagcccggcatacgctcttcattgatgttcggcccggcctgcatgttgttggtacacatggtccagtaaacattcagtttgccgtctttcagcgcacggtcttgtgccaccgcgtgcagaccgattttcgccggaatggtgccgctcgggatattccacttcttctcgcagatatcacggtgtttctcgttggtcaccaccatgtccgcaggcagacggtgagcaaaggtgcccacttcacgcgcagtaccacacgcagaaggttgcccggtcagggagaacggaccgcaacccggctgggaaattttgccggtcagcaggtgcaggttgtagaccaggttgttagcccacacgccacgagtatgctggttgaagcccatcgtccagtaggagatgactttcttgttcggatcggcatacagctgcgccagttgttctaactggtctttcggcacgccggtcatttcggcagttttttccagcgtatactcggcaacgaaggctttgtaatcttcaaagctcatcggttcggaggcgtcagaacccggattcttcgctgctttttccagcggatgggtcggacgtaaaccgtagccgatgtccgtcgcccctttgcgcaggttaacgtgcttgctgaagaagtcctgatttatcgcattgttttgaatgatatagttggcgatgtagttcaggatcaccaggtcagattgcggcgtaaagatgatgccgttatccgccagctcgaagctacgatgctggtaggtagaaagcaccgccacggtgacgttctggttagagagacgacggttagtgatgcggctccagaggatcgggtgcatttccgccatgtttgcgccccacagcacaaacgcgtcagcctgctcgatgtcgtcatagcagcccatcggctcatccataccaaaggtacgcataaagccaactactgcgctcgccatacagtgacgcgcgttcgggtcgatgttgttgctacggaagcccgctttaaacagcttggacgcggcataaccttcccagatagtccactgaccagaaccgaacataccgatgctttccggccctttttctttcagggcggttttgaatttctcttccatcacatcgaaggcctgatcccaggtgattggggtaaattcgccttctttgtcatatttaccgtttttcatacgcagcagcggctgcgtcaaacggtctttaccgtacatgattttgggcaggaaatagcccttaatgcagttcaggccacggttaaccggtgcgtccgggtcgccctgacaggccaccacacgtccctgctgcgttccgaccagaacgccgcaaccagtaccgcagaaacggcacggcgctttatcccatttgatggcttcctgctgaccaacaacggcgcgggcaacgcccggcacgctgagaccggcagccgccgcagcggccgcaacggcgttagctttcataaagctacgacgactgagtttcatggtgtttcctcaccttgctcttcctgctggtgataaaccaggctcaccgccagcacgccctctacgttgcgtacactctcaatggtttggatcagcgtttcgctgtcttctgcttccaccaccacaatcaactgaccgctcggcgcgtcgctgacagcaacttcacagccgggaaaggcgttcagttgggtgctgatgtcactaattcgttcgcttttggcctgcacgaccaggctgcaaacttgccagttagtgtgcatggagatactccgcagttatggcacttaccggacagctggctgcacatgctccacatccgttgcaaagttggctattaagttgcggctggtagatcccggagagcgtcgggcgaaagataattgccattggctcacagctatcctgacagcggcggcattcaacactctgatacgccaggcacgcgtccccgatggtgaactgcaaatcccaggccctggtgtggcgcggagaaaataggctttcggggcaagcctgcgcgcaggcgtaacagaagctgcactcgttatttttgaaattaacgctcggatagccgcccgcgccgcgttgcagaatgttgttttcacaagcattaatacaggcgtcgcagcgggtgcaatgggtcagaaaatgagattcatcaccggaccagggcggacggataccgttactggctttgcgccagcgaccagtgagtatgccccgacgggatgcatcaatcttcacattgaccttccatcattaacgcgctctgaaaattgagagcgaccaaataaaccgcataattaataagccatttttatagccgctaagatattaaaggatgtgtcaaagatgcataccccgatcggggtaaaacctgtagcaggatcaaaagagtggcgggaagcgtggcaaaaacgggcttttgctcacatttcaaatggttataaatatatttatatagcgattgattcaccagagatatttctgctggtttgctctctcattagaatttaacactaaaagagcaggtaaaattgtctgaatgttctttaagttattcataaagcaaattaataaatctgatgaatatgttaaccttcagcgacatcatcggtgaaaacctataaatgaagaaggaaagcaaaaaaatgaagaccattctacctgcagtattgtttgccgctttcgctaccacttccgcctgggcggcagaaagcgtccagccactggaaaaaatcgcgccttatccacaagctgaaaaagggatgaagcgtcaggtgattcagttaaccccgcaagaagatgaatctaccctgaaagtagaactgttaatcggtcagacgctggaagtcgattgcaatttgcatcgtctcggcgggaagctggaaaacaaaacgctggaaggctggggctatgattattatgtctttgataaagtcagttccccggttagtacgatgatggcctgcccggatggcaagaaagagaagaaatttgtcaccgcgtatctgggcgatgctggaatgctgcgttacaacagcaagctgccgatcgtggtgtatacgccagacaatgtagatgtgaagtaccgcgtctggaaggcggaagagaaaattgacaacgcggtagttcgctaaactgccgtgaagtgcggcaccccgtaggtcagacaaggcggtcacgccgcatccgacatccaacgcccgagccggttgcctgatgcgacgctggcgcgtcttatcaggcctacaccgctgtgaagtgcggcaccccgtaggtcagacaaggcggtcacgccgcatccgacatccaacgcccgagccggttgcctgatgcgacgctggcgcgtcttatcaggcctacaccgctgtgaagtgctccaccccgtaggtcggataaggcggttacgccgcatccgacatctaacgcccaagccggttgcctgatgcgacgctggcgcgtcttatcaggcctacaccgctgtgaagtgctccaccccgtaggttggataaggcggttacgccgcatccgacatccaacgtccgagccggttgcctgatgcgacgctggcgcgtcttatcaggcctacaccgctgtgaagtgctccaccccgtaggtcggataaggcggttacgccgcatccgacatctaacgcccaagccggttgcctgatgcgacgctggcgcgtcttatcaggcctacaccgctgtgaagtgctccaccccgtaggttggataaggcggttacgccgcatccaacatctaacgcccgagccggttgcctgatgcgacgctggcgcgtcttatcagcatacgccacatccggcataccatgccggatgtggcgtatcattacaacgcaatatccgccacttctttttgaacgggttgcggtttcaactgcggtttcggcgtactatctgctgcctgcggcttgtcgtagttcaaccccagcacttcgctggtgtactgcaactcgcgttctgttgccgctacatcaccgttcagcttgcgtccataagacggaacgatcgctttcaacgtagcctgccattgcgggctggaaacacgatcgccaaatactttttccagcagattcaacataatcggcgcggcggtactcgcccctgggcttgcccccaggagcgcggcaatggttccttgctggtcactgacgacttcagtacccagacgcagtacgccacctttctcggcatcacgcttgataatctgcacgcgctgccccgcttgccacaaacgccagtcctcttttttcgcctgcggatagtactctttcaacgcttcaaaacgatcctcttcactcaacatcacctgactcaccagatatttcaccagatcgaaattatccagcccgacgtgcatcatcggcatcacgttagaggtggtggtggaactcattagatcccacaaactaccgtttttgaggaatttggtactgaaggtggcaaatggcccaaacagcactacgcgtttaccgtccagaacgcgggtatcgatatgcggaacgctcatcggtggtgcgccaacggatgctttaccgtaaaccttcgccagatggtgattaaccacgtccgggttttcgctaacaaggaactgtccgcccaccgggaaaccggcgtagtctttcgcttccggaatcccgctttcctgtaacagcttcagcgccgcaccgcccgcgccgataaagacaaatttggcacgaatgttctgtgcagtgccatttttcagatcggcaacggtaacggtccaggtgttatcgtcattacgctttagggcgcggacttcgctgctgagttgcaggctgaagttagatttcttctgcaaggaagcaattaactggcgggtgatctcgccgtagttcacatcggtaccaatttccgtacgcgtggctgccactttctgttgcggatcgcgcccttccatcactaacggtgcccactctttgatctgcgcgtgatcttcagagtaacgcataccgcgaaacaggctgctttgttgcaacgcggcgtaacgggcgcgcaggaaattgacgttatcctcgccccagacaaagctcatatgcggaacggtattgataaaactacgcggagtacgcagcacgccgcgctcaacctggtgcgcccagaactggcgggaaatctgaaatgcttcgttaatggcgactgctttttcaatactgatgctgccatcggcgttttgcggggtgtagttcagttccatcagtgcagaatgcccggttccggcgttattccagccgttgctactctcctgcgcgacaccctccaggcgctccaccatggtcatgctccattcaggctccagctcgcgtaaataggtccccaacgtggcgctcataatgccgccgccaatcaacagtacatcagtttcctgctcctcggacgctttcgcttttgccgccatgctaacggcattaagccccacggccatgctgaagagcatggcagtcacttttttcatcttgttaatgccttacttttagtcgctttattgcaggtgagatttgcgcggcatcaacggtaacacttaagtaacaacatttaaataatgtttataaattatattctaattttagaaacattataatttcgttgattaattatagggttattagaaatgaagggatttttagcatattgacctgacggcagcagtccgccaggtcagcgtcgtaatattatgccgtccgggcaacggcatcacggctagcggcatcgcgctcttcgcccgtcagctcgctaagttgcccattgcgcatttccagcaggcggtcggcgtggataaagtaatgatcatcatgactgatagcgaaaatagttttacccatctcctgcatcagcggcagcaacacctgataaaactcacgacggaagtgtggatcctgatccgccgcccattcatccagcaggataatatcgcgttcttctgccagcgccagcaacagcgccacgcgttttttctgccctttacttaacttcaggttaacaatacgcccgttgcttaactcaagcttatgagccattttcagctgcgccagccacttctcaaccagttgcgggttagcgggtttaccctccggccccagcagttgatcaaacagccagacatcggtaaacactgcgctaaacagtttgcgataatcttccggttgttcgccgctgacaggtttgccatccagcaagatttcgccgctttgtggctgatacaagcccgtcaacaacatcgccagcgtgctttttccgctaccgttgccgccaatcagaaacagcagctcgccacgtttgatggtgagattaatcggaccaacggaaaacgcgttatcctgataagcaaacgtcacgttacgcagctccagcgtttgccagttgggaaacgcctgcgggcgcggaaactctgctttgaaaggcgcgagcgcgaatttgttcagcttgttaaacgccacctgcgccgtcagcagcgtcggcaatgcgccaaccgcgctaagcagcggcgtacgcaggaataaaagcgtcaagctataggtcgcggcaacgttggtatcagcccaaccgaggctgttcgccatccagaacaccaggccgattgcgcccagcatcatgatgttactccagttcacggcactaagatggaaggtgtctgcgcgaataatatggtggcgatactcttgcgcatcaggaatgtagaggttgttaaacacatactcggcgcgttcccggttcagagtcagctctttgcgcccttcaagtacagtttgaaaatccgtgtacagcttgtcttcggtttcacgcagggtcgccatatgtttgtacacccgcgccaccagcacaaaaccgccccagatggtgatcgccatccagatagccgttaccagcaacattttgccgctcagcatccacagatacgccgcactaccgatagtgagaatgatcccctgcaccagttccggcagacgcacaaaagcaatggtgatattgcgcacatcgctggttaaccccgccagcaagctggcgctaccgagttgttcaatgcgctcgacgtgagtatccagaatccgcttgataaattcactacgcagtcggtaaacgaagtgatgccccaaagtggtgagcgccagttggcttccgagagtgactgccatcaacagcagcaataatcccagaaactccggcaacaccagcagactggtatccgccgtttcgataaggcgctgattgataaaagcaattaagccaatgcctaatgccgcactggcgaggcttagcgccatcacactgataaatggccagcgatactgccgccagacaagtacaagaagttccatgcagaaaacccggacaatgaattacagcccgcagtttaaacatcttcgcgcgcacagcaataataattcttatttttattcttttttacctgcctgacggaatgtcaggttgtagcggcagtcgatggtgagtggatgaaaccccgctttcaacggttgaataccgtgataaaacagccggctttcaccgccccataccaccacatcgccatgttccaacaacaaacgtttgagcggatcatttcgtttcaggccgccaaattgaaaaatcgcgggtaagcccagagaaacagaaacaattggcgcgcgcagatccggttcgtctttatcctgatgcaggctcagtttcgcgccaggagcgtagcggttgataagacaagcatctggctggaaatctggatagcccgccgccgtagccgcacgttgacataaattatgaaaactctgtggcatggcgggccacggtttatttgtttgcggatcaatggggctatagagataaccttgccgatgggtcgtccagcccagatgcccacagttggtcatcgccacgctcatggtatatcccccgggggtgaccatctggcgaaacgggctctggctggcaacgtcattaatatcgcggatcagttgctccgcagcgttaaaagcaaaacgccgtaaaattaccgcaccagccgccagtggctcttgccacggttcagcatcggcaaacagatccaacattacctctcctcattttcagcttcgcggcgcagcagttgcgctttacggctcacgccccagcggtaaccggaaagtgtgccatcaccacggaccacccgatgacagggtattatgatagccagcttgttggcggcacaggcgctggcaacggcccgtaccgctttcggtttgccgatggcgttagccagttgctgataactgacggtttcaccgcaaggtatcgtgcgcagtgcctgccagacttgttgctgaaaagcagtgccgcgaatgtccagcggtaacgtcagcggcgtatcgcgttgattgaggctggcgatcacttcacgcacatgttgctgaaacatcagatcggcaggcgcgttgtcggcagcgggaaacatctgctgcaactcgctgattagtgtcgcgtcatcatcgcccagcaatatcgcgcaaatcccccgctcgctttctgccaccaggcaacgacccagctcacaatcagccagcgcgtaacgcaccgccagattttcgccaccgtgacggaattgtttagccgtcatgcccagcgtttcgtcagctttgcgatagtaactgctgctgtcggggaatccggcgttaagaatagacgtcgtcacgctctcccctttcgccaggctttcgcgcaaacggcgagcgcgccaggcctgttgccaggctttaggcgtcattccggtagtcgctttaaacaaccgatgtagatgaaatggactcatcgccacctggtcggctaaggcttccagcgttacaggcgtttcctgttccagcagtcgacacgcgtgggtgattttatccaaccgatgttgctgggcattggctttttctggctgacaacgtttgcaggggcgaaagccagcggcgagtgcctcgctggcatttgcgtagaaggagacgttttcccgcaaagcatgtctggcgcggcaagacggacggcaaaagatgcctgtggtacgcacggcgaaaacgaattcgccgtcggcattcgggtcgcgggctaagacagattgccagcgttgatcgtcagttaagcatgtggcttttttcataatcagctccctggttaaggatagcctttaggctgcccggtcaccatcacgcaaaaaccaacaatcttgcgctttaatttttttcgctgacaaggaagcttttaaactgtggactcatccaggttttaaagctatcgccttctttggtgatcatataaaccgccagcccttcccggcgaacaacctctttagctttctccggcccgagtaccatcaagccagtatcccaggcatcggcttccagcgccgtcggagcaatcaccgtcacggataccagattgtgttcgatgggacgcccggtttgcggatcgataacatgggaaagacgtttgccgtccagttcgtaatagttacggtagctgccagaggtgctaatcccatgaccgttgatatccaccacagcctgaaccgcgttttctttatcggttggtttttgaatcgctacccgccacggcaggccttcaccgttcataccacggctgttcagcgcgccgcccacgctcaccagatagcgggaaatcccttcctgctccatcaagcgtgccaaatgatcggccgcatagccttcgccgacggtggagagatcgacatataaatccggcaggtctttttgcagatattgctgatggctctgattgatgaccgtcaggtgctgtaagccggttttggctttcatcgcatcgatctgttcctggctcggaatttgaaccggctgttgttccgggccaaagccccacagattcaccagcggcccgacggttatatccatcgcgccatcggtcttcgcgccaatgcgcaggctggtggtgacgatatcggccatcgcttcacttaccggccacgggcttaaactttggctgtcgttaaagcgcatcagcgcggaatcttttttataggtgctaagcagctgatcgtcggcgtccagttgggtctgaatcttttctttaagttcggcgctgcgtttggcgtcaatgcccgggatgctggcacgccagaaggtacccatagttttgccttcaagaacggtaacttcagtagcgtgggttttggcgggttgtggtttttgatcgcaaccaacaaagaagagcgcggcagccagcagtgccacgcgggtaaagcttatttccatacgtgattatcctcatgcgaacggtcgcaagagtacaccaaaaaactgagtttgtacgctgaaaacaatgaaaaaagggcccgcaggccctttgttcgatatcaatcgagattagaactggtaaaccagacccagagctacgatgttatcagtgttgatgccagcgtcacgagtgaactggttgtcgtccagcaggttgattttgtagtcaacgtaggtggacatgtttttgttgaagtagtaggtagcaccaacatcaacatatttcaggatatcttcgtcgtcgtagccacgacccaggtttttacctttagactgcaggtaagccagggacggacgcagaccgaagtcgaactggtactgagcaacagcttcgaagttctgtgctttgttcgcccaacccagggaacctacgcgagttgcgttgtaggtctgggtgtactgagcagccaggtagatgttgttagcgtcgtatttcagaccaccagtgtaggtttcagcacggtcgccgttaccgatgtaagcagcggtgttctgagcatcagtacgtttggagctggagatcgcaccaccgataccgaaaccttcgtaatcataagtgatagaaccgccgacgccgtcgccgttttgacgcagtgcgtcacgaccgttgttagttacgccactagtaaagccttcaccagatgggttgccgtttttaccctggtactgaacagcaaagttcaggccgtcaaccagaccgaagaagtcagtgttacggtaggtcgcgaagccgttaccacgctgctgcatgaagttgtcagaaccgtaggtgtcaccaccgaattctggcagtacgtcggtccaggaagttacgtcataaacaacgccgtagttacgaccgtagtcgaaagaacccacatcctggaatttcagacctgcgaatgccacacgggtccaggagttgttttcgttttcagcgctgttgccctggatctgatattcccactggccgtaaccggtcagctggtcagtaacctgagtttcacctttgaagccaagacgcatgtaggtctggtcgccatctacatctttgttgtcagagaaatagtgcaggccgtctactttaccgtacagatctaatttgttgccgtctttgttgtaaacttcagcagcgtttgctgcgcctgctaccagcagagctgggaccaggagggacagtactttaactttcatgttattaaccctctgttatatgcctttatttgcttttttatgccactgcatactgattaaccctcattaatcagtcggcaagtccattctccccaaaaatgcagaataatccaacacgaatatgatactaaaacttttaagatgtttcatttatcgctatagatgtttcaaaatgtaaatgcaagggaactttttaagattattgcggaatggcgaaataagcacctaacatcaagcaataataattcaaggttaaaatcaataacttattcttaagtatttgacagcactgaatgtcaaaacaaaaccttcactcgcaactagaataactcccgctatcatcattaactttatttattaccgtcattcatttctgaatgtctgtttacccctatttcaaccggatgcctcgcattcggttttttttacccttctttacacacttttcattattctgtgctaccacagaaaaactataacgcttgttaactatttcacaaataattaacatccgcataatttccagcaatctttgtttatttgcaattatttttgttgggctttttgtaggttatttgtacagcaaaatggcgcttgtacatctatttcccccaatgcaggatgataaatatcacgggagaatagagaatcatcaatcaggtaagagtctggaatttcacactgtaccctttatactgccctatcacttcgcgaagttttaacaggtcataaacacgaatgcgtcagaaagagacaacggccacgacccgctttagtctcctaccggggagcattacccgcttctttttactgttgatcattgtgttactggtgacgatgggtgtaatggtacaaagcgccgttaacgcctggctgaaagataaaagttaccagattgtcgacattacccatgctatccaaaagcgcgtcgataactggcgttacgtgacctggcagatctacgacaacattgccgcgacgacctccccctcctccggcgaaggtttacaagagacgcgcctgaaacaggatgtctactatctggagaaaccacgccgcaaaacggaagcgttaatctttggctctcacgacaacagtacgcttgagatgactcagcggatgtccacttatctggatacattgtggggcgcagaaaatgtaccgtggagcatgtattacctgaatggtcaggataacagtctggtgctgatcagtaccctaccccttaaagatctcacctccggatttaaagaaagcaccgtcagcgacattgttgatagtcgtcgtgcagagatgttgcaacaggccaacgccctcgatgaacgcgaaagcttttctaacatgcgccgcctggcctggcagaacggtcattactttacattgcgtactacctttaaccagccaggacatctggcaacggtcgtggcttttgatctgccgattaatgatttgatcccaccgggtatgccgctggacagtttccgccttgagccagacgcgacggcaacgggaaacaatgataatgagaaagaagggacggatagcgtcagtatccactttaacagtacgaagattgaaatctccagcgcactcaactctaccgatatgcgcctggtctggcaggttccttatggcaccttattgctggatacgttgcaaaacattctgctgccactgctgctgaacatcggtttgctggcgctggcgttatttggctataccacattccgccatttctccagccgcagtacagaaaacgtccccagcacggcggtcaataacgaattgcgcattttacgggcaatcaatgaagagatagtcagtctgctgccgctcggcctgctggttcacgatcaggaaagcaaccgcactgtcataagtaacaaaattgccgatcatttgctgccgcatttgaatctgcaaaacatcaccaccatggcggaacagcatcaggggattattcaggcgacgatcaataacgagctgtatgagatccgcatgttccgcagccaggtcgcgccgcgcacacaaattttcattattcgcgatcaggatcgcgaagtgctggtaaacaagaaactcaagcaggcgcagcgtctgtatgagaaaaaccagcaggggcggatgatctttatgaaaaacattggcgatgcgctgaaagaacccgcacagtccctggcggagagcgcggctaaactcaacgccccggaaagcaaacaactggcgaatcaggcagatgtgctggtgcggctggttgatgaaatacagttagcgaacatgcttgcggatgatagctggaaaagtgagacggtgctgttctccgtgcaggatttaattgatgaagttgtgcctagtgtgttgcctgccatcaagcgtaaaggtctgcaactgctgattaacaatcatctgaaagcacacgatatgcgccgcggcgatcgcgatgccttacgacgtattttgctgctactgatgcaatatgccgtgaccagtacgcaattgggaaaaatcacccttgaggttgatcaggatgagtcctccgaagaccgcctgacgttccgcattctggacacgggagaaggcgtaagtattcatgaaatggataatttgcacttcccgtttatcaaccagacccaaaacgatcgctatggcaaggcggacccgctggcattctggctgagcgatcaactggcacgtaaactgggcggtcatttaaacatcaaaacgcgggatgggcttggtacacgctactctgtgcatatcaaaatgctcgcagctgacccggaagttgaagaggaagaagagcgtttactggatgatgtctgcgtaatggtggatgttactagcgcagaaattcggaatattgtcactcgccagttagaaaattggggtgcaacctgtatcacacccgatgaaagattaattagtcaagattatgatatctttttaacggataatccgtctaatcttactgcctctggcttgcttttaagcgatgatgagtctggcgtacgggaaattgggcctggtcaattgtgcgtcaacttcaatatgagcaacgctatgcaggaagcggtcttacaattaattgaagtgcaactggcgcaggaagaggtgacagaaagccctctgggcggagatgaaaatgcgcaactccatgccagcggctattatgcgctctttgtagacacagtaccggatgatgttaagaggctgtatactgaagcagcaaccagtgactttgctgcgttagcccaaacggctcatcgtcttaaaggcgtatttgccatgctaaatctggtacccggcaagcagttatgtgaaacgctggaacatctgattcgtgagaaggatgttccaggaatagaaaaatacatcagcgacattgacagttatgtcaagagcttgctgtaacaaggtagcctattacatgaacaatatgaacgtaattattgccgatgaccatccgatagtcttgttcggtattcgcaaaagtcttgagcaaattgagtgggtgaatgttgtcggcgaatttgaagactctacagcactgatcaacaacctgccgaaactggatgcgcatgtgttgattaccgatctctccatgcctggcgataagtacggcgatggcattaccttaatcaagtacatcaagcgccatttcccaagcctgagcatcattgttctgactatgaacaacaacccggcgattcttagtgcggtattggatctggatatcgaagggatcgtgctgaaacaaggtgcaccgaccgatctgccgaaagctctcgccgcgctgcagaaagggaagaaatttaccccggaaagcgtttctcgcctgttggaaaaaatcagtgctggtggttacggtgacaagcgtctcagcccaaaagagagtgaagttctgcgcctgtttgcggaaggcttcctggtgaccgagatcgctaaaaagctgaaccgcagtattaaaaccatcagtagccagaagaaatctgcgatgatgaagctgggtgtcgagaacgatatcgccctgctgaattatctctctagtgtgaccttaagtccggcagataaagactaatcacctgtaggccagataagacgcgttagtgtcttatctggcatttgcaccgattgccggatgcggcgtaaacgccttatccggcctacgattcccattatttcaacaaattacattaaagtaggccagataagacgcgtcagcgtcgcatctggcatttgcactgaatgccggatgcggcgtaaacgccttatccgtcttagctatcccggcttttcctgaccctctcggcatataacgtcagcgtctgttttatcacatccagcgttaccggcttgctcaggcagctgtccataccggactccagacaccgctgcttctcttcagccaacgcattagcagttactccgattaccggcaacgtcagtcccaactgacgaatgcgttgcgtcaagcggtaaccatccatatttggcatgttgacgtcgctaagcacgatatcaatatgattcttgctaagtacattaagcgcatcgacgccatcattcgcggttttacattgatagcccaagcttcccaactgatctgccagcaaacgccggttaatcggatgatcatccacgaccagaatcatcatatcgtcattatcgctgaccgctttgtccgtactcggcagagcgttagcaggatcgtcgctctccatctcgatcaaataaatacgcgccaacaatgccggtagctcatgcggagcagccacactgtgtacccactcccctggcgctttctccagcggaataccaatatggcgacgacagaaggtcactaccgctctgccctgccattttttactcactacctcgtcagtgatcaacacatcttcgggagtcggttcctgcccttcgtatgttgtaacgacgatgccgctgcgctgcaaactggtttccaggaactgacagaggctcgcattgcggaccgccagccagcagcgtttaccactcaacccttccacgccttttttctgcgggtactgagcgccgtacaacggaatacgcacggtaaactggctgcccattcccggttcactatctacgctgatatcgccgtccatcatgctgatcagtttttcacaaatcgccagacccagaccggtcccctggaaattacgctgtacgcccgttccgacctggaagaagggatcaaacaagcgcaccacttctttcgccggtatccccacgccggtatcgcgaacacggatagagagataatcgccatccgcgcgaacatgcaaaactatacagccggtatcggtgaattttatggcgttactcaacaggttggagatgacctgctgtaaacgcatcgggtcgccatttaaggccactggcacatccggttcaataaagcagtacaagcctaactgcttgcgtaccaccagcggtaaatagttggcggtgatgtggttcatcacttcacgcggactaaactcacgcggttcgatcttcaactgttcgctttcaatcttgctgaaatcgagaatatcgctgataattttcaacaacaggctggaagagttgttcattgccgtcaccagccgatcgacgcctttcggtaactctttggtttgcaacagatccaggttaccgataatgccatacagcggcgttcgcagctcatgactgacggtggcaaggaacatgcttttactctggctcgcctgttccgctgcttgtgccatctcctgcaagctctcttccatcttcacgcggctagaaacatccaccagcacacaaatggccacgttttcattacgatagcggctatggacgaagctgatttgcagattggtattgttgctggtcaggacatcaacaaaattgacctgctgcccacagataatttgcgtcagtcgttggcggtcctcatgcgtaagcatattgagataggtatgcgccagttcgttacttaaaatattgacgccatcagcggtacgcaaaatgcagatacccactggcgcggaggcgacaatcttgcgattgaactgctcatgttcttccagtcgcagggcgtcgctttccgccggaatgaaaatacgtcgctcgtacatccgtgcgagagtaaacaatgcagctccggcaagcacattcagcaaaattgcgttaaggatcaacatgcgaatgcgttccagcaccttatcaaccggcacgctatacacgatgcttaggctactgggtggcagatttttcttcagcaccagctcccggaacccttccgtatagccaaaccaggagcgttcctgcatccagcgaggatcgcccttaattttactttctggtccggtaaggctaatcagggtatgaccattttcatcaagaatggtaacccccatcggcaacgtacccggtaagaaaaagttctccatccggatggtctgctcgacacccaaaagcgcctgcaaccggttcgccagataaactggcgtcaacgcgtaaaaatacccgacgccagggcgcggaccttcgctgatccagtagaggttactgccgctatcatcttgtggtgcatttcgatatttattgatgcgttcatgcaaagctttcaacgcggtatcgcgttccactggcatatcacgcagaccgaaattggccatgcagaggttatcgctgccgattaaaaatacccggtttagatcgtaagccgcagaaaaattatcgcgccagtagcgcataaaccacgccaaactctccagagaacctcgccaggtgttactcattgcggaacaatcggagtcggcaaacagcggttcaaacgcaggcacatccgcctgcgtttctcgtccacgcggggaaagcacaccgttttctgcgcttaagcgattttcggcgatgtacttcagctctttcatcacatcagaggtgcgttgaataaagcgctgagcctgatcggaactcagattaaattcctgacgaatttcgctttctcgctgatgtaacgcattaacgatgtaaaaaacggaactaaaagcaatcaacagccagagcactaacgccaatgctctgaacatgtagcggctggctttcagggttgtacgaaaagaagcaaggtatttcaaaggggcgaagctccgcctcaggtgaccgatggagtgtggttaaggtagcggtaaaagcgtgttaccgcaatgttctctcttctctggaatatgatacaccgccgagaaatcatcaccttaacctctgataatcgtcatataccggacaagactagtggatttcagcatgcattatatgaagtggatttatccacgccgcttacgcaatcaaatgatcctgatggcaatcctgatggtcattgtcccaacgcttactattggttatatcgtagaaacggaaggacgtagtgcagtcttatctgaaaaagagaaaaaactttctgccgtggtcaacctgcttaatcaggcactaggcgatcgctatgatctctacatcgacttaccacgtgaggagcgtatccgcgcattaaatgcagaacttgcccccattaccgaaaatatcactcacgccttccctggcatcggtgctggttattacaacaaaatgctggatgcgataatcacctacgcgcctagtgcgctatatcagaataatgtcggcgttaccattgccgcagatcaccctggtcgcgaagtgatgcgtacaaatacccctttagtttatagtggcaggcaggtgcgcggcgatattttgaatagtatgctccccattgagcgtaatggtgaaatcctcggctatatctgggccaatgaattaaccgaagatattcgccgccaggcctggaaaatggatgtgaggattatcattgtgctcaccgctggtttgctgataagcctgctgttgattgtccttttctcccgtcgcctgagcgccaatattgatatcatcaccgatggcctcagcactctggcacaaaatattcccactcgattaccacaattgcccggtgaaatggggcaaatcagtcagagtgttaataacctcgcccaggcactgcgtgaaacgcggacacttaacgatctgattattgaaaacgctgccgatggcgtcattgccattgaccgccagggtgatgtaaccaccatgaacccagcagcagaagttatcactggctatcaacgccatgaactggtagggcagccttactccatgttgttcgacaatactcagttctacagtccagtactggatacgctggaacatggcaccgaacatgtggcgctggagatcagttttccaggtcgtgaccgcaccattgaactcagtgtcactaccagtcgtattcataacacgcacggtgaaatgataggtgctttggtgattttctctgatttaactgcccgcaaagaaacccagcgccgcatggcgcaagcagaacgcctcgccacactgggtgagctgatggctggcgtcgcgcatgaagtacgtaatccgttaacggctattcgtggttatgtacagatcttgcgccaacaaaccagtgacccaatacatcaggaatatctgtccgtagtactcaaagaaatcgatagtattaacaaagttattcagcaattgctcgaatttagtcgtccacgccacagtcaatggcaacaagtcagcctcaatgcattggttgaagaaactctggtactggtacaaaccgccggcgtacaagcgcgggtcgacttcataagcgaactggataatgaattaagcccgattaacgccgatcgtgaactgctcaaacaggtactactgaatatcctgatcaatgccgtccaggctatcagcgcacgagggaaaattcgcattcaaacctggcaatacagcgacagtcaacaggccattagcatagaggacaacggctgtggcattgatctcagcctgcaaaaaaagatcttcgatccctttttcaccaccaaagccagtggaaccgggcttggtctggcgttaagtcaacgcatcattaatgcccatcagggtgatattcgcgtcgccagtttgccgggctacggcgcaaccttcacgcttattttaccgatcaacccgcagggaaatcagactgtatgactgctattaatcgcatccttattgtggatgatgaagataatgttcgccgtatgctgagcaccgcttttgcactacaaggattcgaaacacattgtgcgaacaacggacgcacagcattacacctgtttgccgatattcaccctgatgtggtgttgatggatatccgcatgccagagatggacggcatcaaggcactaaaggagatgcgcagccatgagacccggacacccgttattctgatgacggcctatgcggaagtggaaaccgccgtcgaagcgctacgctgcggagccttcgactatgttattaaaccgtttgatctcgatgagttgaatttaatcgttcagcgcgctttacaactccagagtatgaaaaaagagatccgtcatctgcaccaggcactgagcaccagctggcaatgggggcacattctcaccaacagcccggcgatgatggacatctgcaaagacaccgccaaaattgccctttctcaggccagcgtcttgattagcggtgaaagcggcaccgggaaagagttgattgccagagcgattcactacaatagccggcgggcaaaggggccgttcattaaagtcaactgcgcggcgctgccggaaagcttgctcgaaagtgaactgtttggtcatgaaaaaggtgcatttactggtgcacaaaccttgcgtcagggattatttgaacgagccaacgaaggtactctgctcctcgacgaaattggcgaaatgccgctggtactacaagccaaattactacgcattctacaggaacgggaatttgaacggattggcggccatcagaccataaaagttgatatccgcatcattgctgccaccaaccgcgacttgcaggcaatggtaaaagaaggcaccttccgtgaagatctcttttatcgccttaacgttattcatttaatactgccgcctctgcgcgatcgccgggaagatatttccctgttagctaatcactttttgcaaaaattcagtagtgagaatcagcgcgatattatcgacatcgatccgatggcaatgagtctgcttaccgcctggagttggccgggaaatattcgagagctttccaacgttattgaacgcgccgtcgtgatgaatagtggcccgatcattttttctgaggatcttccgccacagattcgtcagccagtctgtaatgctggcgaggtaaaaacagcccctgtcggtgagcgtaatttaaaagaggaaattaaacgcgtcgaaaaacgcatcattatggaagtgctggaacaacaagaaggaaaccgaacccgcactgctttaatgctgggcatcagtcgccgtgcattgatgtataaactccaggaatacggtatcgatccggcggatgtataacaccaaaacttgctatgcagaaatttgcacagtgcgcaattttctgcatagccgctcattctccttataaatccccatccaatttatcccttcatattcaattagttaaataactaaatccaataatctcattctggcactccccttgctattgcctgactgtacccacaacggtgtatgcaagagggataaaaaatgaaaacaaaattgatgacattacaagacgccaccggcttctttcgtgacggcatgaccatcatggtgggcggatttatggggattggcactccatcccgcctggttgaagcattactggaatctggtgttcgcgacctgacattgatagccaatgataccgcgtttgttgataccggcatcggtccgctcatcgtcaatggtcgagtccgcaaagtgattgctagtcatatcggcaccaacccggaaacaggtcggcgcatgatatctggtgagatggacgtcgttctggtgccgcaaggtacgctaatcgagcaaattcgctgtggtggagctggacttggtggttttctcaccccaacgggtgtcggcaccgtcgtagaggaaggcaaacagacactgacactcgacggtaaaacctggctgctcgaacgcccactgcgcgccgacctggcgctaattcgcgctcatcgttgcgacacacttggcaacctgacctatcaacttagcgcccgcaactttaaccccctgatagcccttgcggctgatatcacgctggtagagccagatgaactggtcgaaaccggcgagctgcaacctgaccatattgtcacccctggtgccgttatcgaccacatcatcgttagtcaggagagcaaataatggatgcgaaacaacgtattgcgcgccgtgtggcgcaagagcttcgtgatggtgacatcgttaacttagggatcggtttacccacaatggtcgccaattatttaccggagggtattcatatcactctgcaaagcgaaaacggcttcctcggtttaggcccggtcacgacagcgcatccagatctggtgaacgctggcgggcaaccgtgcggtgttttacccggtgcagccatgtttgatagcgccatgagttttgcgctaatccgtggcggtcatattgatgcctgcgtgctcggcggtttgcaagtagacgaagaagcaaacctcgcgaactgggtagtgcctgggaaaatggtgcccggtatgggtggcgcgatggatctggtgaccgggagccgcaaagtgatcatcgccatggaacattgcgccaaagatggtagtgcaaaaattttgcgccgctgcaccatgccactcactgcgcaacatgcggtgcatatgctggttactgaactggctgtctttcgttttattgacggcaaaatgtggctcaccgaaattgccgacgggtgtgatttagccaccgtgcgtgccaaaacagaagctcggtttgaagtcgccgccgatctgaatacgcaacggggtgatttatgattggtcgcataagccgttttatgacgcgttttgtcagccggtggcttcccgatccactgatctttgccatgttgctgacattgctaacattcgtgatcgcgctttggttaacaccacaaacgccgatcagcatggtgaaaatgtggggtgacggtttctggaacttgctggcgtttggtatgcagatggcgcttatcatcgttaccggtcatgcccttgccagctctgctccggtgaaaagtttgctgcgtactgccgcctccgccgcaaagacgcccgtacagggcgtcatgctggtcactttcttcggtagtgtcgcttgtgtcatcaactggggatttggtttggttgtcggcgcaatgtttgcccgtgaagtcgcccggcgagtccccggttctgattatccgttgctcattgcctgcgcctacattggttttctcacctggggtggcggcttctctggaagtatgcctctgttggctgcaacaccgggcaacccggttgagcatatcgccgggctgatcccggtgggcgatactctgttcagtggttttaacattttcatcactgtggcgttgattgtggtgatgccatttatcacccgcatgatgatgccaaaaccgtctgacgtggtgagtatcgatccaaaactactcatggaagaggctgattttcaaaagcagctaccgaaagatgccccaccatccgagcgactggaagaaagccgcattctgacgttgatcatcggcgcactcggtatcgcttaccttgcgatgtacttcagcgaacatggcttcaacatcaccatcaataccgtcaacctgatgtttatgattgcgggtctgctgctacataaaacgccaatggcttatatgcgtgctatcagcgcggcagcacgcagtactgccggtattctggtgcaattccccttctacgctgggatccaactgatgatggagcattccggtctgggcggactcattaccgaattcttcatcaatgttgcgaacaaagacaccttcccggtaatgaccttttttagttctgcactgattaacttcgccgttccgtctggcggcggtcactgggttattcagggacctttcgtgatacccgcagcccaggcgctgggcgctgatctcggtaaaagcgtaatggcgatcgcctacggcgagcaatggatgaacatggcacaaccattctgggcgctgccagcactggcaatcgccggactcggtgtccgcgacatcatgggctactgcatcactgccctgctcttctccggtgtcattttcgtcattggtttaacgctgttctgacggcacccctacaaacagaaggaatataaaatgaaaaattgtgtcatcgtcagtgcggtacgtactgctatcggtagttttaacggtagtctcgcttccaccagcgccatcgacctgggggcgacagtaattaaagccgccattgaacgtgcaaaaatcgatagtcaacacgttgatgaagtgattatgggtaacgtgttacaagccgggctggggcaaaatccggcgcgtcaggcactgttaaaaagcgggctggcagaaacggtgtgcggattcacggtcaataaagtatgtggtagcggtcttaaaagtgtggcgcttgccgcccaggccattcaggcaggtcaggcgcagagcattgtggcggggggtatggaaaatatgagtttagccccctacttactcgatgcaaaagcacgctctggttatcgtcttggagacggacaggtttatgacgtaatcctgcgcgatggcctgatgtgcgccacccatggttatcatatggggattaccgccgaaaacgtggctaaagagtacggaattacccgtgaaatgcaggatgaactggcgctacatagtcagcgtaaagcggcagccgcaattgagtccggtgcttttacagccgaaatcgtcccggtaaatgttgtcactcgaaagaaaaccttcgtcttcagtcaagacgaattcccgaaagcgaatagtacggctgaagcgttaggtgcattgcgcccggccttcgataaagcaggaacagtcaccgctgggaacgcgtctggtattaacgacggtgctgccgctctggtgattatggaagaatctgcggcgctggcagcaggccttacccccctggctcgcattaaaagttatgccagcggtggcgtgccccccgcattgatgggtatggggccagtacctgccacgcaaaaagcgttacaactggcggggctgcaactggcggatattgatctcattgaggctaatgaagcatttgctgcacagttccttgccgttgggaaaaacctgggctttgattctgagaaagtgaatgtcaacggcggggccatcgcgctcgggcatcctatcggtgccagtggtgctcgtattctggtcacactattacatgccatgcaggcacgcgataaaacgctggggctggcaacactgtgcattggcggcggtcagggaattgcgatggtgattgaacggttgaattaatcaataaaaacacccgatagcgaaagttatcgggtgttttcttgaacatcgacggcgaaggtaaccccattaatcaccagtcaaaacttttcaccagcgtcagctcgccagcattacgcatcggtacaataaatgtttcctgtttctcattgacgcttccttcatcggtgatcagcgtcagttgggcggtggttaattccgtttcgctgcgcccaccatagtagttgatatacacctgatagcgcccgtgaattggcgcgggcatggcgaaaatctcgggtccgtaccccgtcgtgacatccatatccagtgcaccactgtttttcagcacggtgttaccgtaccaggcgtgttcgccatcgggcgtaacaacgtgaaggtcgaggtcggtattgtccgtatcccagctgagaaccagccgtaaacgtgcacgaatcgttcctgtacccggcgtactgtaaaactgcattttttgtcggctttgcccatccgggctgatgacctgcacgctgttgctgccttcagtgaaaatataagggcgtgcaaaactaccatcggattcaattctctgcggcatactggcaccgttgaccaccagccggccctgctgaactttacccgccgcagcataattctttattttgccgcggatctgcgcactgatattttgatcatctgccatgttgacggagctcgccgggtaattgatgctttgactaaaactggcatcttcgccctctgccggatgccagccactgagcggtgcatcaatctcgacttcctgcacaccttcactgtgagcgacagggctaagcgccaccagtaacaacggaagaaaaatctttcgcatagcattagtccattaataattgtcgggtcagcgtttcgatatagttctcatcaagcccggtgggataaccatcaaaggccaggtgcagatactcatgggttaaatccagccgatcctgaagcgtaaagaagttacgaataaacagccgtttctgctgccgatcggtataggggaaaccactgactaaacggcaaaccgcaaacacgtctggttcgttgtaccccgtctcagcttgtaatatacgccgccactgcggcatttttttcgccagccaggctttcgctttgggtaataactggcaggtactgcgtggcgctccccagcggctaagactgttgtcgggataagcaaacgcgagtatctgatcgtaacgctctccctgccccgcctgggccgtggcttgccgccaggaaagtgtcccttcggtagcgcgactgccatgataatgaaccggatcgcctgcatagatgagatcctgcgtccaggcggtcatcgttcgcgcccccgtggtcgctgggctagcagaaacacgctgcgtggcgctgctgtcggggatggtcaggcaatcgccttcccgattggcgttttgctgtaaaaaagtgcgaatcgccacggtcatggctttcgctgcctcagggggcgtacttttcgcctcgcgatccagaactctggcaacgtactcttcacgatcgagatggctctgcaatttcagtttgcccttttcgctcagtaaggtcgtctcaccgtggctgacaaacgtaatgtggttaccattagtaaacgtcacacgatagcgcccattaagtacgccgggatttactgccgtcgtactcttttccgctgtgattttcttcagcggatagcgggcaaacagctccacctctacacattgcccactggcaacctgcgtcggcactggcaaaacccgattaagcaccgtcgcataacgggttagtaccgttttgctggtgccactgccagtaacccacagcggtgtaccatcggttaaccagccagcaaaaccaccctgacggatttcctgtttatcatcggcaaaccagctccaggttttcacccgtacccgactaccgagcatggatgcgacaccgattttcgcctcgtccagcaccacatccagtaagacttcctgagctttgttttgcgcgggtaacgtcgctaaactatcaagcaggcttttaaccgttacgctggtttctggcttcagcgtagtcagagacgctaaccacgcaggtgcctgacgctgttgccagtattgcccccacacatctgcgccaatatgcaaccgctgcggcgcaaaatagagcccacaggaacgtaccagcgcggtatcgcgcgttatgctctccccagcctgacaacaataaacctcttccggggagtttccgcgacactggtagggctgctccggttgatgggtatcctccagccaggcgtaaacatacagtttccacaaactccctaacggcgtggtgaggctgtcaggtaatgcactgactttggtcacgccactactgctcagctgatacagttgatcgtgctgcgcaccgcgcagcaccagttgtaacggcgtctcctccgcaagtgttggcagagtaaccaacgccaatagccagacgattcagcgccagttcacttatttcacctgcatcccggtccattcactccctgccgcaacactttgctgcgcaggtgcataggaacgcacataacgagcaggaggcagaacgaattgccctttttgcgagaagcgcagcaaatggcggaaagtgaccgttcccgtcagttctttcaccggcaccatataggccagttcgcccatttcatttcgcgctttttccagcaattgcccctgctgtttcgcggcgttgggtttattgaccgaaatgccccatgttgtgcgctcaacgtcggctcccggtggcagcggtacttccacctgaccgtagcgcagaactgcatcctgctcgctggtaagcgtgatttcatcgagatacagcgcatcgctgtcaatctcattgctggtcaccggttgcagaataaagctcatctcttcttcaccagggataagccgatacaactggcgttcaacggtcaccggaatgttactttgttgagccatttttgccggctcacgtcagcggacctgcacattttgcggcgataattcgtcaccaaaagagagaatgtccggcacgccctgaccaacccaacgccagtcttcgccccctccagttaacttatgtttagcccatgcgcccgcaggcgcaggcaaaacaactggaggcattgtcgccatatatttcgccagccagttcatggccagcgcgcgctcaatagtggattgctcagcggtcaaaccacttaaaatagcggccgtctgggtagcgtcgccaccgctattaagcagcacaaccgtgtgcgccagcggctgattgctgtttgccgctttatcccacgcatattgctgaacctgtggcatcaccgtggacttcaactgcgcttttttcagcaacgtcatggttaagacgtttgccaccgcatctgccagtggagactccggtgtatcgaggatcaggctatcattgatatcgcgggtgtcttcctcagagaaatcttcagttttagttccgcgccgggcgatagcttcatccaaccctttcaacaacgttttgcacggcaaattcatctcctgcgcccatgccagcaccagcgcccgatgcaataacggcatgttatctgcctgctccgcgtagctgtcgagcatatgctgccagtattccggttgttgcgttacgccgatcgcctggctggcctgccagtcggcgtaccatgcccatgccgtaaggaaggcgtcaccattgccatcttcaccccaccaggtaaagcgcgctccgggccccgccagttgcatcagccgcagacggttatcctgaatcatctgacgaatgtcgttagcggcggcactttgatgatcggcaagcgaacgccaggcgagactgagcgggatcagacggctaccggtgttgattacgccaccccacggttcatcgactaacgcatcaagattgttgcggaaaatctcctgcggcgtttcactactttgtagccggatattgctcgcctgctcgggcaacatcagcgcgttatcgccaccaccgagcatgacatttttctgctgttcaacgggccagctgttatccacaaaagacagttttgtgctaatgctgtcctgcacttgcccattttgttgcagttctgcacttaacaagccagattgctgaatattctgcgtcagcgaaatataattcgcccctttgtgcagcgtcagcgtctggcgcatctcagcgcctgcaaatttagtcaccagcgccaccggttcgttatcctgctgactgaagataaatagtcctgccgccggtttgtcgcccacgcgatacaccgttggcatactccacttcatgtagagatttttttccgaacgcagataagcacgcccctgcccgaccagcccgtcgccgttcatcccacgcgcggtgatacgccagcgggttaacgaatcaggcatcaggaacgtgaaatacgctttgccttgtttatcggttgtgagtgacggcatccatgccgcggtatccacctcttcacgccgtggacgttcaagcatttttactcgccgctcgctgcggttagttgcgccaggcgcaaccggctcgctggagagcgcctggtcgtagctgataaacgacagactggagctggtacgcacattgttacgccccagcggatagaaaaatttgccgatattcggcgcgatttctggttgcagcgcgtagatcatttcatcgaccacgcctaccgttagctgcgcagaaacaggtttacctttcagcgacgaggttaattcgacattgaccagttcaccaggctggtaatgggttttgtccgttttcacccggatatccagctggggaacggcaactttgatcccggcgttctgaaaactgtactgaccgttacgggtatacagcaccgaaaaagtgatgttaggcgcaaaggaattgctcactggaacccgggcttcatactgggtatcgtttaaacgttgtagcgttagccagtttgccggatgcgaaagcagcgactgctgttccacgcgatcgcgttccagcgtcaataatgcttcatcaattggctccggaaaggtaatcagcatcttcgcggtttcgcctggctggtacagcgttttatccgccacgatatctaccgtaccagtatgcgccgtgctgcccttaccgctgacggcatgacttaacccagcgagaattaagccgtctttatcgcgtaatgtcagattgtagttgccaggtttagcgaaattgacggtaaaggatttgccgcctgacggtagctctccgctatggctcgtgcggtcttcgagacgcaaccattcatacgtaacaggaacctgttttgaagattccagcgcggcataacggaacacaaccgactcgccgctattactgtattgtgcggcagtacttaatgagtaatgcgccagaccgcgttcaatgaggatctctttggtggtggtgacgcgatacgccgcgccgtcactggcggagacggttaacaaatagcggctcggtttatcggcggcggggagatttaacgccacatgaccgctggcgtcggacaccgtttcgctgccttccagcgacacggggaaacgtccggcataacgcaaatcgttaccgaccattgataattgctgagcgcgcaaacttaactgcacgcgggcattttttaccggctcgccatccgggtagagcagttgcagtttgccgctgaccgcttcgccagttttgaactcttttttggcgagagctaaaccaatctcgaaatgtggcttgatgtagtttgccacgcgaaaactgctgctatagacctgattgcggtaagcaagacgtaactcataacctccggctacggcattttctggcaggcggaaacttccctgcccgccattgcgcgcatccagcgtgacattgacggtttgcaacagactgccgttggcgtccagcaccgaaagcttcgccggggcgctgacgatgggggatgaatgcaacggatcgtggaactcgcggccgatcactttaacatcgacacgatcgcctgcgcgatatagcgggcgatcggtaaaaatatacaagcgggtgttgtagatttcgctttcgtagaagaagttctcggagacaaaaacgccgccttcagcatccttacccagaatgtatgaacgttctggcgatatatgttgtaactgcaaggtaccgctgtcatcggtcacaccgcgggtcatcacgccaagaccgtcagtccacaagatctctgagccgggcttcgcttcaccctgttttttacccgcggtccacaccagaagctctttgcctgacactttgctaagcgccacggtatcggaaacaaacaccaccgtcgtcgcccgatacccaccaaccatcgcctcgacgaggtacagtcccggctcttgttggccgagaggaatataaatgttacccggctgcggcgagatgaaattgctggatgcgccttccagttttaccccttgctgcggctcgaacggtttagcctgccatagtggataacggaactgtttcaccaggggatattttttcagcggggaaaactggttgttctgtacataacgggaaggtttaataatggcattgccgagctgtaattcgggtaacgcctgagtcacattctgccgtgactgagaagagaaagtacgctgcatcacgcggcgagatttgccgtaccagttatcccacagccaggttagcgtattgttcagcccgtcgcccagatattgcggttgcaccacaatgcgatgcaggtttttctgctggcgcaaaaatgccatcgggtcaggaatacgatacaggcgaacgtccacgccgccgtactcttccatctgatagcgccgataatcacgccccggcgcttccagtcgcactttcgcctcttcactgctgctaaaactgctgtcagcaagcaaaaagaatgttcccccggcaggcggcgcatagttgctggaaggaagcgaatcatcagcattagcaagccctgttcccacaagagacagggacaagcacgctgttatcgcgccagaaaatttaaacgataaatgccaatgaaattgggattggaatcgttgggtatccatcgggtgtccttccatgtcataagttgttgcagactgactgcgcgcattccgttgtcagttttcgtggcgcttccggtgtggtagatgacgtaacgccccatccagaccattaagtgctgggcatcgccctgatcgaaaaaaatcatatcgccaggcagcgcctggtttatgtcctggccaataaactggctgttgtactgaatcaaattaatcgcggtcacataggggccggttttcccgttcccctgattccagttttgcgccagttgacgctgttcaggtgttagcgtcatctctggcggcaaatactggctagataaaccgttactttttagccatttactgtcgtgaactttcagcgtctcgttcgccgcaaatcgcaccaggcccgcacaatcctgctgataccagcgtggacttggcccctggcggagctgttcttgtgcaatgcgtacaaaccaggcgcgaaacagcccggattgttcgacattcagcatttcgctatgggcaacaacacaacacagccagcaaatcagcgccagcagcccgtgcctcatagcggctgccaggttatgggtagccactgccaggcggcaccgggttccatctgggccagcttcatgacataacgcggttgttgagataaagcgtccagcttcggcattaataaagtttgtgcggcgttataaaaaaccggttcgagattcttcggcagactggtcaacgtttcgttacgcagcagtttcgctattccttgtggattgatatagagcggaacgatgccatcagtgggtattacatccaccattgccgggcgggttttattcagtgtttgcagcgcgttattaaccagcgtgtcatcgagggagaaaagcagcgttttgttttgcatcgccaggctcacacggaaaaaataatcgctcattaattgatcgggttgcgccgcctgcgctttcggatactggccgtatcgggaactcacttcgcgacgccagatttgcgcttcgccctgctgagtctggcttaccggcaaaacaccttctggcgctttgctttcgtgcgcaccaatattttgcgtaaacagtttccctggcaattgcgcctgttcggcagtgccatcaaactgaccgacaaacagcggggtttgcaatttactgtcttcataccagcacagccccgcggcaccgtctaacgccccattcagcttgtcgttttcctggctgatgtggctaagcatctcttcggcaataccgtgactatacggcaccgccacacagaagctggctccggcaggcatactgttccataccggcgtaaaatcgaaactggcatctacgctggcggattcatcatttaacgccacaaaactgtgccagccgtcgttacccatttcgaagcgtacgccagcaaaagaaggcattaaccgctggtagccaaaccccagccacctggcgctgactacgatgcgctggcgtactggcgttttttcggcagtacgctcttccaggccaaagcttgcttgccagcgttttttgccgctcaacaaatcacctgcgatcgccgtggcttcggtatcctgctgatcatctttaaacaacatatccgtgctggaaaacaccagcatcttgtcctgataagtcgcgaacatcagggcgttattgccgttatagcgcaactgataaacaggaacagtttcactatttatcttgatgctactgatttccgttttgcttaactggctgtcgctggtagcggcaaacaacaatggctccagcagtttgcttaaaccactgcgctggatcagcaccatataatgactaagatggccttgtttatcgtgccacagcgctgcctgcgcgggctgatctaagagactgctaaagagcttatctttcagcgtgagatcgtgttcatagacaatacgacgaatgctgccttcaatgcccagacgatcggcatgattctgataatagaaaacgaaatcttcgctcagaacatcgtggagaaacggaatggtgaggagatctttgggaagctggctcagagagtcgctgtcgagaaagaggtccggctcattgagatcgatttgcagattgttgtgcaccaccagcgggctcaacgttttttctggcccactgccagcatattgcaacgcccagacgccagcggaaagcagtgctattgcgccaaaacctacaagaccatagaaccgccagcctttcgccttttttcaccactcattgccacattccttgtgtatagccagccattttttacgggcacagccaaactttaccgtgccctaatacgacaaaagcccagactttgcagcctggacttttcaattcaaacaagggagatagctcccttttggcatgaagaagtaaaattattcttcttctggctcgtcgtcaacgtccacttccggagcgatttcatcgtccccttccgcggcactgccgtcgatggtatccagatcttcctcgtcaaccggttcagcaacacgttgcagacccactacgttttcatcttccgcagtacggatgaggatcacgccctgggtgttacggcccacgatgctgatttcgctaacgcgagtacgtaccagcgtaccggcatcggtgatcatcatgatctggtcgcagtcatctacctgtaccgcgccaacaactaaaccgttacgttcggtaaccttgatggagataacccctttcgtcgcacggctcttggttgggtattccgccactgcggtacgtttaccgtaaccgttttgcgttgcggtgaggattgcgccatcgccacgaggcacgatcagagagacgactttatcgccttcacctaagcgaataccgcgaacaccggtggtgttgcagcccatcgcacggacagaagactctttaaagcgcaccactttaccttcagcggagaacagcattacttcgtcttcgccgctggtcaggtcaacgccgatcagctcatcgccgtcaaccagtttgatcgccactttaccggcggtacgcagacggttgaactcggtgaggacagttttcttcacggtaccgttagcggtcgccatgaagactttcacgccttcttcaaactcggtcactggcaggatcgcagtgatacgttcgtcctgctccagcggcagcaggttgacgatcggacgaccgcgcgcgccacgagtggcttccggcaactgataaactttcatgctatagacgcgaccacggctggagaagcacagaatatggtcgtgagtgttcgccaccagcagtcggtcgataaagtcttcttctttaatacgtgcggcagatttacctttcccgccacgacgctgcgcttcgtattcagaaagcggctgatacttaacgtagccctggtgagagagcgtcacgaccacatcttcctgggtgatcagatcttccaggttgatgtctgcgctgttggcggtgatttcagtacgacgtttgtcaccgaactgttcacgaaccagctccagctcttcacggatcacttccatcagacgatcggcgctaccaagaatacgcaacagttccgcgatctgatccagcagctctttgtattcgtcgagcagtttttcgtgctcaagaccggtcagtttctgcaaacgcagatccagaatcgcctgagcttgctgttcggtcaggtagtacagaccatcacgcacgccgaactctggctccagccattccggacgcgcagcatcgtcgccagcacgttcgagcatcgcggcaacgttgcccagctgccacggattagcaaccagcgcagttttcgcttctgcaggcgtcggcgcatgacggatcagttcgatgatcgggtcgatgttcgccagcgccacggctaatgcttcaaggatatgagcacgatcgcgagctttacgcagttcgaaaatagtacgacgggtcaccacttcacggcggtgacgaacaaacgccgcgatgatgtctttcaggttcatgatcttcggctgaccatggtgcaatgccaccatgttgataccgaaagaaacctgcaactgggtctgggagtagaggttgttgagcacaacttcaccgaccgcatcgcgtttcacttcaatcacgatgcgcataccgtctttgtcagactcgtcacgcagcgcgctgatgccttccacgcgtttttcttttaccagttccgcaatcttctcgatcaggcgcgctttgtttacctgatacggaatttcgtggacgataatggtttcacgaccggttttggcgtcaacttccacttctgcgcgagcgcggatatacaccttgccgcgaccggtacggtaagcttcttcaataccgcgacgaccgttaatgattgccgccgtcgggaagtccggccccgggatgtgttccatcagcccttcaatgctgatgtcttcatcatcaatatacgccagacaaccgttgatgacttccgtcaggttgtgcggcgggatgttggttgccatacctacggcgataccggaagaaccgttcaccagcaggttaggaattttggttggcatgacgtccggaattttttccgtgccgtcatagttatcaacgaaatcgaccgtctctttttcgagatcggccatcagttcatgggcaattttcgccagacggatttccgtataacgcattgccgccgcagagtcgccgtcgatagaaccgaagttaccctgaccgtctaccagcatataacgcaggctgaatggctgcgccatgcggacgatcgtgtcatagaccgcgctgtcaccatggggatggtatttaccgattacgtcaccaacgacacgggcagattttttataggctttgttccagtcattgcctagtacgttcatggcgtaaagtacgcgacggtgtaccggcttcaggccatctcggacatctggcagcgcacggccaacaatgacgctcatcgcataatccagataggagctcttcagctcttcctcaatgttgaccggtgtaatttctctcgcaaggtcgctcatctaaccgctatccctctactgtatcccggattcaaaggtcgcaaattataacacagccgcgcagtttgaggtaaacctatacgctttattcacatccaatgcctgatatactcgtttgtcttgccaattacggagtagaagtgccaatgaatgccgaaaaaagcccggtaaaccataacgtagaccacgaagagatcgctaaatttgaagccgtcgcctcccgctggtgggatctggaaggtgagttcaaaccgctgcaccgcattaacccgctgcgtctgggctatattgccgagcgtgctggcggtttatttggcaaaaaggtgctcgatgtcggttgtggcggcggcattctggccgagagtatggcgcgcgaaggcgcgacggtgaccggtctggatatgggctttgagccattgcaggtggcaaaactgcacgcactggaaagcggcattcaggtggattacgtgcaggaaaccgtggaagagcacgcggcaaaacatgccgggcagtatgatgtggtgacctgcatggagatgctggagcacgtccccgatccgcagagtgtggtcagagcctgtgcgcaactggtgaaaccaggcggcgatgtctttttcagcacacttaaccgcaacggcaagagttggctgatggcggtggttggtgcggaatatattttgcgcatggtgcccaaaggcacgcatgatgtgaagaagtttattaaaccggcagaattgctgggctgggtggatcagaccagtttaaaagagcggcatatcactgggctgcattacaacccgatcactaatacttttaaactcggccccggcgtggatgtgaactatatgctgcacacgcagaataagtgaggttgatgtttggccgcgccaatgcctgatgcgacgcttgccgcgtcttatcaggcctacaaatgctccccgtaggccggataaggcgtttacgccgcatccggcaaccgtgccgactagacagtgattaccatttcaccgtcatgctcaaaaaccctgccgtctgggcaaaatcatcactccctttctgccacgccacgctgccgcgcagggacactcgctgactgatattgcccgtgactcccacttttatttcaccccgttgcttcaccgcatcgtcactgatagtgctgccatcctcttcaatttccgtgctatggggatcgtgataataattcagatctaatgttggtatgacatgaacagcggtacgccattcgctgtgtaaacccagccgcgtctgaatatcatcaccctggctttgactcacgcgcgcacggttagcggcggtaaaatcatcctgctgcacgccctgataaatcacctgcgcctgcggttcaatcaccacaccacgccccggtaaccactgataccccgcctccaggctggcgataatcccgctgctgtggtaatgatctgtgccatcttcttgttcggaaacatcattgctaaaccacgcgtattgcagccagctatccagccaggccccttgcttctgattaccgtgctgaaaccagctacttgtcagcccaacggcataaccgtggttctggttatcggcgcgagttccggtcatattgctgcggctgtcgccctggttatcgctgtagccaccaacaatcccaagcatccactcgccatccgtgccccagcgcccgctaaacagatcgccgctaagttgcaccgtagaagtgtcttcatgttgagccagttgccccgctgctgtgtaatgataatctccgccgataacacgtaaattcagcgtctgaccatcgccacctgcgtgatcgcgtcgctccatcataaacgcctgatttgccgcccgcaggttattaagataaccgccaactttggcattcaacaccggctggtaagcaggcgtaggttccgggtcgggtgttggatcaggatccggcgtgggatcaggatcgggagtcgggtctggatcaggtgggcttggcggcgttacttcttggcttcgcagataccagtcgttgttatcttccaccagcgtgtagtcatacgctcccatattgacgtagccgctgcctgccagactgaactgcgcattgttttgaaactgcgtgggatcagctgcgaaatcaaccactttaatgcctgtgcttgtcggctcaccaatccctgtaatggagttaaccaccacagttgtgttgccagcagtattaccgttcatcaccaattgatcgcttacgctgtcatcgccgtttaattcgctatcgagcagtagcgtaccgccgccggtataatcaccgtttaccgtcagcgtatcgccagcgacgccattttgcaggctaaccgcaccggacgtattggtcagattgccattaaccgtcacgttggaaagataagtcaggctgtcagtttcaaggttggtattaagctcacctgtcaacgtcacaccatcggtggcattcaccagcgtcccatcgccgttaaatagactggcattaagggcgacggaagtatcctgcccggtcaggcgcaaaaccgtaccatcgctgatgtcgatagtgccgctggaaatagcatcaatactctgaatatcctgatccgcgccagtaacgaacgttgccccatcaccaacccacagactgctagcataaggaaggatatcagcaacatcacctttcagggtgccttcttcgacacgtaccgcgctctgcgttgtaccgctggcggtcagctccagtgtaccagcccccgttttagtcaatgtgctaccctcatcctgatgctgcccgctgctgtcagccatcagtgcgccccactgcgtgtctacccccgcatcaactgccacttcaccgtcggcgcgcatttcaatatcacgtccgtggcctgccgcatcactacgcgtgtcaacgtcggaggtaatctccatcacgctttcttgttgcttatcggtaaagataacctggcggttatagtgggtatctccaagctggctgttgtcgctcaccatcagcgtaccggaggcgatttgtgttgtgcccaaataactattattgtttgccagacttacctgcccgtcgctcgcatcgaccaccacgtagacgccatctttcccgtcgccgccgatatgcaaattgtcgccacctgcaagatctaccacatcctgactgccgataaccgttccgctgctgccactgacttcaaggccatcgttgtaacttgtgccgctctgccaggtggagaaatcagagagatcgagcacaccgccgtttaacacgatgctctgcggatcgtcctggagagcggtaagatctgccgcgtcgccttccaggctaagcaccgcaccatcatcaacgactatatcgccggttagcgccatgctctgcgcccctgccagcacgtagctgccgttttgcgcaatggtgagctgaccagcaccttcgatgatgccagcaaaactgccctgattaacagtaacgttgccaccagcatcgatatttaaagtgccattctgaaagcccgtcaatgcgtgcacaaaagtttgttgggtgctgccaacgtttagctcagcctgattctgatactgatcaatactccctatcgtcagaccgtagcagtcttgcggatcgtcctggcaatgcgtatcgccgacattcatcagggagttgctgcggcccagggtaacttcaccgttttcaatctgcatctcaccagtaaagtcattgttatctgcattaagtaccagatcgccggaacctgttttggtgattaacccggtaccagcaatagagtcaacagctccgtcattctctgtattgccaataaccagcgtttttccgtcggcaatatcaaaggtaacttcacttaagccgagatacataaagccacccgccgcagaggaaggaccatctccatagcctgctgcgctattgttctcatcgactaacacgcctccgttctggctgtagctgtcatcaacagaaatatcaataagatagggagccgtcacgctattggtatatatcgccccgccataaccttcggcagtgttatttgtaaaggcagtgttatttactatcgtataaccactaggatgcttgctgtcgctattattatcggtaacatcgattgccccgccatcgccatcactgtaacttgtacttgtatatgcctggttgttatcaaaaataacatcacttaaataaacgtcattattaatggtataaattgcgccacctttgccatcattagcgatgttattgcgaaacatggcgttagtgacacgtaaatcgacggcaccagtatcgttagtaccagaagaatagattgcgccaccatagccgcctgcgacgttaccggaaaaaataacatcagtaagattcagcgtactgttttctttagcaaatatggccccgccgttattatattctcctgtaacggtgttattggcaaacagagtcattccagtttcattttctggtaatagactaaattccgctccttgttgcaaaaatacggccccaccgctggcgttattggtcatatcgctaaaaaccagccattgcccatcagcgatactccagtcctgcgtaatgccactaaggctttgcctgctggcctgacaactcgctttgacatcatatccctggcaactatcagtgaccgccgcgacaccgttagcagagaaaagagatgcaatcatactcgggagtaaagataaatactccttgcgtagaaagataatccgcatattaatctaaccatcattttctataagacggcgtatttaatcgcattatacgatatggaatatctttcttttgtaaattgttcaacccggtgcaatggctattttgttattatttgatgaataatatcagtgcgtcataattcaagttaataaccttcagggatatcagttatatttaaactaaattaaagtcatgaataattttcttataatataaggtaaattaacaaaatggcttagcatttaacaataaccgaatagaaaacaaccatttcgccatcaacaatctcttacattcgcttatatattgaccacaactgatacatcagattatgtgatgactcgtgcttagatcaatttttgcaatcattagcaaaaagattaataagccatctatatcaatttatctaacctattatgccgttcaagaaatcgccgaacagttatttttaacaaatttttctcttcccattgactttcccggacaccttgtctgacctaaggtgcgcgaaagccactttttccttcctgagttatccacaaagttatgcacttgcaagagggtcattttcacactatcttgcagtgaatcccaaacataccccctatatatagtgttctaagcagcttcccgtactacaggtagtctgcatgaaactattgcggaaagaattccaaaaacaggtacgacatacatgaatcagaatctgctggtgacaaagcgcgacggtagcacagagcgcatcaatctcgacaaaatccatcgcgttctggattgggcggcagaaggactgcataacgttagcatttcccaggtcgagctgcgctcccacattcagttttatgacggtatcaagacctctgacatccacgaaaccattatcaaggctgccgcagacctgatctcccgtgatgcgccggattatcagtatctcgccgcgcgcctggcgatcttccacctgcgtaaaaaagcctacggccagtttgagccgcctgcgctgtacgaccacgtggtgaaaatggtcgagatgggcaaatacgataatcatctgctggaagactacacggaagaagagttcaagcagatggacacctttatcgatcacgaccgtgatatgaccttctcttatgctgccgttaagcagctggaaggcaaatatctggtacagaaccgcgtgaccggcgaaatctatgagagcgcccagttcctttatattctagttgccgcgtgcttgttcagcaactacccgcgtgaaacgcgcctgcaatatgtgaagcgtttttacgacgcggtttccacatttaaaattagcctgccgacgccaatcatgtccggcgtgcgtaccccgactcgtcagttcagctcctgcgtactgatcgagtgcggtgacagcctggattccatcaacgccacctccagcgcgattgttaaatacgtttcccagcgtgccgggatcggcatcaacgccgggcgtattcgtgcgctgggtagcccgattcgcggtggtgaagcgttccataccggctgcattccgttctacaaacatttccagacagcggtgaaatcctgctctcagggcggtgtgcgcggcggtgcggcaacgctgttctacccgatgtggcatctggaagtggaaagcctgctggtgttgaaaaacaaccgtggtgtggaaggcaaccgcgtgcgtcatatggactacggggtacaaatcaacaaactgatgtatacccgtctgctgaaaggtgaagatatcaccctgttcagcccgtccgacgtaccggggctgtacgacgcgttcttcgccgatcaggaagagtttgaacgtctgtataccaaatatgagaaagacgacagcatccgcaagcagcgtgtgaaagccgttgagctgttcagcctgatgatgcaggaacgtgcgtctaccggtcgtatctatattcagaacgttgaccactgcaatacccatagcccgtttgatccggccatcgcgccagtgcgtcagtctaacctgtgcctggagatagccctgccgaccaaaccgctgaacgacgtcaacgacgagaacggtgaaatcgcgctgtgtacgctgtctgctttcaacctgggcgcaattaataacctggatgaactggaagagctggcaattctggcggttcgtgcacttgacgcgctgctggattatcaggattacccgatcccggccgccaaacgtggagcgatgggtcgtcgtacgctgggtattggtgtgatcaacttcgcttactacctggcgaagcacggtaaacgctactccgacggcagcgccaacaacctgacgcataaaaccttcgaagccattcagtattacctgctgaaagcctctaatgagctggcgaaagagcaaggcgcgtgcccgtggtttaacgaaaccacttacgcgaaagggatcctgccgatcgatacctataagaaagatctggataccatcgctaatgagccgctgcattacgactgggaagctctgcgtgagagtatcaaaacgcacggtctgcgtaactccacgctttctgctctgatgccgtccgagacttctagccagatctctaacgccactaacggtattgaaccgccgcgcggttacgtcagcatcaaagcgagcaaagacggtattttgcgccaggtggtgccggactacgagcacctgcacgacgcctatgagctgctgtgggaaatgccgggtaacgatggttatctgcaactggtgggtatcatgcagaaatttatcgatcagagcatctctgccaacaccaactacgatccgagtcgcttcccgagtggaaaagtgccgatgcagcagttgctgaaagacctgctcaccgcctacaaattcggggtcaaaacactgtattatcagaacacccgtgacggcgctgaagacgcacaagacgatctggtgccgagtatccaggacgatggctgcgaaagcggcgcatgtaagatctgatattgagatgccggatgcggcgtaaacgccttatccggcctacggctcggtttgtaggcctgataagacgcgccagcgtcgcatcaggctccgggtgccggatgcagcgtgaacgccttatccggcctacggctcggatttgtaggcctgataagacgcgccagcgtcgcatcaggcacaggatgcggcgtaaaatgccttatccggcattaaactcccaacaggacacactcatggcatataccacctttagtcagacgaaaaatgatcagctcaaagaaccgatgttctttggtcagccggtcaacgtggctcgctacgatcagcaaaaatatgacatcttcgaaaagctgatcgaaaagcagctctctttcttctggcgtccggaagaagttgacgtctcccgcgaccgtatagattaccaggcgctgccggagcacgaaaaacacatctttatcagcaacctgaaatatcagacgctgctggattccattcagggtcgtagcccgaacgtggcgctattgccgcttatttctattccggaactggaaacctgggtcgaaacctgggcgttcagtgaaacgattcattcccgttcctatactcatatcattcgtaatatcgttaacgatccgtctgttgtgtttgacgatatcgtcaccaacgagcagatccagaaacgtgcggaagggatctccagctattacgatgagctgatcgaaatgaccagctactggcatctgctgggcgaaggtacccacaccgttaacggtaaaactgtgaccgttagcctgcgcgagctgaagaaaaaactgtatctctgcctgatgagcgttaacgcgctggaagcgattcgtttctacgtcagctttgcttgttccttcgcatttgcagaacgcgaattgatggaaggcaacgccaaaattattcgcctgattgcccgcgacgaagccctgcacctgaccggcacccagcatatgctgaatctgctgcgcagcggcgcggacgatcctgagatggcggaaattgccgaagagtgtaagcaggagtgctatgacctgtttgttcaggcagctcaacaggagaaagactgggcggattatctgttccgcgacggtagcatgattggtctgaataaagacattctctgccagtacgttgaatacatcaccaatatccgtatgcaggcagtcggtttggatctgccgttccagacgcgctccaacccgatcccgtggatcaacacttggctggtgtctgataacgtgcaggttgctccgcaggaagtggaagtcagttcttatctggtcgggcagattgacagcgaagtggacaccgacgatttgagtaacttccagctctgatggcccgcgttaccctgcgcatcactggcacacaactgctgtgccaggatgaacacccttcccttctggcggcgctggaatcccacaatgtggcggttgagtaccagtgtcgcgaaggttactgcggctcctgtcgcacacgcctggttgcaggtcaagttgactggattgccgaaccgttagcctttattcagccgggggaaattttgccctgttgttgccgggcaaaaggcgatattgaaatcgagatgtgaattggttgtagtgccagatacaacgcttatgcgtcttatctggcctacaacgattacatggcgtagtaatacgctttcacctgctcccagtccgctttggggattggctccagatatttttccagctggcggaagtcatgattaatcgctttatcgcgacgcaagcggcgacgacttttctccaggtcaagaaaaccagcttctgcattaccttctgttttcacatagatatggcgaacataacaacagccatgctgacgattaatgctatgcattttcttaaacgccagcgccactgctttcaacatggcttgccgtacttcgtcagaataagggcttactgcatgctgggcataccagtcagcaatgctgatgaaccccgccatatcttcagtcaccagcaacgctcgccattcaccctcaattttcaccgcttcaccaaaaacgatcttcggcacgatgacaccggcccgttccagttctttaattaccgcaacctcacggacaatcgttggtcggccgaacggataacgtacggaatgaaacagatgatgcgtcatgcgctttacatacagctttttgccgttgcgctcgacgcattgcaccccgctcataccattacggcgatagttaggctcttcaacccagtcgccctctgttgcccaccagtgattaaattcgtcgtactttgcactaactgccataccctatcgcctgtcatttttattaacgacaatgactataggtggttacctgaggaaaatcttaatgaaacgtgtcgtattaatgaatttcttttgccactactagcttgacaccgcttttacccttcatttgcagcgcatagattccaccagccactaccactaatagtgcgcccagcagataaaatgtgaatttaatcaggcggatacagcgatgaattttattcgacagggattaggcatcgccttacaaccagagttaacgctgaaaagcattgcaggtgaattgtgttccgttcctctcgaaccaactttctatcgacagattagcttgctggctaaagaaaagccggtagaaggcagtccactgtttttactacaaatgtgcatggaacaattagtggcgattggaaaaatttgatatgagacaggatggcgcatgaacgccatcctgcagtaacattactctttattaagaaattttactgccttatcagggaaatcagtaaacagcccatttacacccgctttgttatacagagcatcatataactgattcacatcaggagtgtattcaggcagtttatcactccgcacggtataaggatgcactaccagtttattctgctgagcatcttgcaccatgccagtgagtttgatattacccggctggcttgtctcctcaatcaacatatggtaatccggaccaataccatctgcatattccgccacctgtttcatggcacccggcttaaacatccagtcgtagttgtaattaacccagcttccatccggctgtttctgctgcgtttcattccagtcggtataggcaatcagctgtaccagattgagctccatgcccattttgggttccagctcattcttaatacgcttcagctcatcagcatcaaaacattgcaaataaactttatcgtctttaccggtgtaaccatatttcttcagcacttccagcgtttttgccgcaatatccttcccttcctgatgatggaaccacggcgctttgatttctggataaataccgatatttttcccggtagagtgatttaacccctgaacaaattcaatctcttcttcaaaggtgtgcacccggaagtcggacttacccattgggaaacgccccggataagtctgcacttttttaccgttttcaatatcgaaaccttcggtaaatttcaagctcttaatttcatccagcgtgaaatctatcgcgtagtaacgaccgtctttgcgcgcccgatccgggaaacgatcggcaacatcagtaacacgatcgaggtaatggtcatgcagaacaaccagattgtcgtctttggtcatcaccaaatcctgttccagataatccgctccctgcgcatacgccatcgcttttgctggcagcgtatgctccggcaaatatccactggcaccgcgatgggcgatgactattttttcgttgctgtccgccgccattgcactgcttcccatgactatagtgctcatcatgatcgccatgctaaggtttttcagcgtcaatttcatgccattagcctccgttgcgttcttgcagtaattgttcatggcgacgtttttcgccaatcatcacaacaatcaacaagataaccgccagaatgctgccgccaatcattaccataaagccgccatcccagccgaagaagtccacggtgtagccaacaatcgcgctcgccgccacgctaccgcccaggtaaccaaacagcccggtaaagcccgctgccgtacctgccgcttttttcggtgccagttccagcgcatgcagaccgatcagcatcacaggaccgtagatcaggaagccgataacaatcatacaaatcatatcgacggttgggttacctgccgggttcatccagtaaacgatagtcgcgatggtcaccagtgtcataaagaaaacgccggttgccccacggttgccacggaagactttatcgttcatccagccgcacagcagagtgcccggaatacctgcatattcataaaggaagtaggcccaggaggatttatctagcgcgaaatgcttaacctctttcagataagtcggactccagtcgaggatgccgtaacgcagcagataaacgaacacgttggcgatggcgatataccacagcagtttgttcggcagtacgtactgcatgaagatttgcttcgccgtcagctcctgttccgctttttcgttatagtcgtccggataatcatttttgtactcttcgatcggcggcaagccacaggattgcggggtatcgcgcatcatcgcaaaggcgaataatgccaccagaatggcgcagaaagcaggcatatagagcgccgcatgccagtcattgaaccaggccatccccagcaggaacagcagcggcggaataccaccaccgacgttgtgcgcacagttccacacactcacaatgccgccacgttctttctggctccaccagtgcaccatagtacgaccacacggcggccaccccatcccctggaaccaaccgcagaggaacaacagtacaaacatcaccgcaatgctgctcgtcgcccatggcacaaagcccataaacaacatcactgccgccgccagaatcaaacctgcgggcaggaaaacgcgcggattgctgcgatcgcttacgctacccatgatgaatttgctaaatccataagcaatgctgatcccgctaagggcaaaacctaaatcaccgcgactgaatccctgctcaaccagataaggcatagcaagcgcaaagttcttacgaaccaaatagtaagccgcatagccaaagaatatccccaggaaaatttgccagcgcaatcgacgataagtcggatcgatctccgcggcaggtaagcgcgctttgtgtggcgctggtttaaaaatactcaacattgatagcctccgtggcccgtggtcttatttatgattaacagcctgattcagtgagagaacctgccgtttcttgagttgccgcgatgttaagaaaacattcataaattaaatgtgaattgccgcacacattattaaataagatttacaaaatgttcaaaatgacgcatgaaatcacgtttcactttcgaattatgagcgaatatgcgcgaaatcaaacaattcatgtttttactatggctaaatggtaaaaaacgaacttcagagggataacaatgaaaactcgcgacagccaaagtagtgacgtgattatcattggcggcggcgcaacgggagccgggattgcccgcgactgtgccctgcgcgggctgcgcgtgattttggttgagcgccacgacatcgcaaccggtgccaccgggcgtaaccacggcctgctgcacagcggtgcgcgctatgcggtaaccgatgcggaaagcgcccgcgaatgcattagtgaaaaccagatcctgaaacgcattgcacgtcactgcgttgaaccaaccaacggcctgtttatcaccctgccggaagatgacctctccttccaggccacttttattcgcgcctgcgaagaagcagggatcagcgcagaagctatagacccgcagcaagcgcgcattatcgaacctgccgttaacccggcactgattggcgcggtgaaagttccggatggcaccgttgatccatttcgtctgaccgcagcaaacatgctggatgccaaagaacacggtgccgttatccttaccgctcatgaagtcacggggctgattcgtgaaggcgcgacggtgtgcggtgttcgtgtacgtaaccatctcaccggcgaaactcaggcccttcatgcacctgtcgtggttaatgccgctgggatctgggggcaacacattgccgaatatgccgatctgcgcattcgcatgttcccggcgaaaggaagcctgctgatcatggatcaccgcattaaccagcatgtgatcaaccgctgccgtaaaccttccgacgccgatattctggtgcctggcgataccattagcctgattggtaccacctctttacgtattgattacaacgagattgacgataatcgagtgacggcagaagaggttgatattctgctgcgtgaaggggaaaaactggcccccgtgatggcgaaaacgcgcattttgcgggcctattctggcgtgcgcccgctggttgccagcgatgacgacccgagcggacgtaacgtcagccgtggcatcgtgctgctcgaccatgctgaacgcgatggtctggacggatttatcaccatcaccggtggcaaactgatgacctatcggctgatggctgaatgggctaccgacgcggtatgccgcaaactgggcaacacgcgcccctgtacgactgccgatctggcactgcctggtagtcaagaacccgctgaagttaccttgcgtaaagtcatctccctgcctgccccgctgcgcggttctgcggtttatcgtcatggcgatcgcacgcctgcctggctgagcgaaggccgtctgcaccgtagcctggtatgtgagtgcgaagcggtaactgcgggtgaagtgcagtacgcggtagaaaatttaaacgttaatagcctgctggatttacgccgtcgtacccgtgtggggatgggcacctgccagggcgaactctgcgcctgccgcgctgccggactgctgcaacgttttaacgtcacgacgtccgcgcaatctatcgagcaactttccaccttccttaacgaacgctggaaaggcgtgcaacccatcgcctggggagatgcactgcgcgaaagcgaatttacccgctgggtttatcagggattgtgtggtctggagaaggagcagaaagatgcgctttgatactgtcattatgggcggcggcctcgccggattactctgtggcctgcaactgcaaaaacacggcctgcgctgtgccattgtcactcgtggtcaaagcgcactgcatttcagttccggaagcctggatttgctgagccatctgccagatggtcaaccggtgacagacattcacagtggactggaatctttgcgtcagcaggcaccagcccatccttactcccttctcgagccacaacgcgtgctcgatctcgcttgccaggcgcaggcattaatcgctgaaagcggtgcgcaattgcagggcagcgtagaacttgctcaccagcgggttacgccgctcggcactctgcgctctacctggctaagtagcccagaagtccccgtctggccgctgcccgcgaagaaaatatgtgtagtgggaattagcggcctgatggattttcaggcgcaccttgcggcagctagcttgcgtgaactcggccttgccgttgaaaccgcagaaatagagctgccggaactggatgtgctgcgcaataacgccaccgaatttcgcgcggtgaatatcgcccgtttccttgataatgaagaaaactggccgctgttacttgatgcgcttattcctgtcgccaatacctgcgaaatgatcctgatgcccgcctgcttcggtctggccgatgacaaactgtggcgttggttgaatgaaaaactaccttgtagtctgatgcttttgccaacgctgccgccttccgtgctgggcattcgtctgcaaaaccagttacagcgccagtttgtgcgccagggtggcgtgtggatgccgggcgatgaagtgaaaaaagtgacctgtaaaaatggcgtagtgaacgaaatctggacccgcaatcacgccgatattccgctacgtccacgtttcgcggttctcgccagcggcagtttctttagtggcggactggtagcggaacgtaacggcattcgagagccgattctcggccttgatgtgctacaaaccgccacgcggggtgaatggtataagggagatttttttgcgccgcaaccgtggcagcagttcggtgtaaccactgatgagacgctacgcccgagtcaggcagggcaaaccattgaaaacctgtttgccatcggtagcgtgctgggcggatttgatcccatcgcccagggatgcggcggcggtgtttgtgccgtcagtgctttacatgccgctcaacagattgcccaacgcgcaggaggccaacaatgaatgacaccagcttcgaaaactgcattaagtgcaccgtctgcaccaccgcctgcccggtgagccgggtgaatcccggttatccagggccaaaacaagccgggccggatggcgagcgtctgcgtttgaaagatggcgcactgtatgacgaggcgctgaaatattgcatcaactgcaaacgttgtgaagtcgcctgcccgtccgatgtgaagattggcgatattatccagcgcgcgcgggcgaaatatgacaccacgcgcccgagcctgcgtaattttgtgttgagtcataccgacctgatgggtagcgtttccacgccgttcgcaccaatcgtcaacaccgctaccagcctgaaaccggtgcggcagctgcttgatgcggcgttaaaaatcgatcatcgccgcacgctaccgaaatactccttcggcacgttccgtcgctggtatcgcagcgtggcggctcagcaagcacaatataaagaccaggtcgctttctttcacggctgcttcgttaactacaaccatccgcagttaggtaaagatttaattaaagtgctcaacgcaatgggtaccggtgtacaactgctcagcaaagaaaaatgctgcggcgtaccgctaatcgccaacggctttaccgataaagcacgcaaacaggcaattacgaatgtagagagcatccgcgaagctgtgggagtaaaaggcattccggtgattgccacctccagtacctgtacatttgccctgcgcgacgaatacccggaagtgctgaatgtcgacaacaaaggcttgcgcgatcatatcgaactggcaacccgctggctgtggcgcaagctggacgaaggcaaaacgttaccgctgaaaccgctgccgctgaaagtggtttatcacactccgtgccatatggaaaaaatgggctggacgctctacaccctggagctgttgcgtaacatcccggggcttgagttaacggtgctggattcccagtgctgcggtattgcgggtacttacggtttcaaaaaagagaactaccccaccagtcaagccatcggcgcaccactgttccgccagatagaagaaagcggcgcagatctggtggtcaccgactgcgaaacctgtaaatggcagattgagatgtccacaagtcttcgctgcgaacatccgattacgctactggcccaggcgctggcttaaactcctttctgatgcccggtaagcatgtggttaccgggcatttttgcgtacacgattccgtgcccaatgtatgcgttgcaacgcagtgaaaattcctctgaaaacgtctcgcaaaggctgaaactggcagatgtcaaaggcctgggataaccgtaatgtcgcgtcatcataaatatcaggtgacggacaaccatgaccgaaagtacaacctcctccccgcatgatgcggtatttaaaacctttatgttcacacccgaaaccgcacgggattttctcgaaatacatttaccagaaccactgcgcaagctttgcaacctgcaaaccttacgcctggaacccactagttttattgaaaaaagtttacgcgcttactacagcgatgttttgtggtccgtggaaaccagcgacggtgacggctatatctactgcgtgattgaacatcaaagctctgcagaaaagaatatggcttttcggctaatgcgctatgccactgccgccatgcagcgtcaccaggacaaaggctatgacagagtcccgctggtggtgccgttgctgttttatcatggcgaaaccagcccttacccgtacagtctcaactggctggatgagtttgacgatccgcaacttgcccggcagttgtacaccgaagcttttctgttggtggatatcaccatcgtacctgacgatgagatcatgcaacatcggcgtatagctctgctggaactgattcaaaagcatattcgcgaccgcgatttaatcggcatggtcgacaggatcaccacgcttttggttagaggcttcactaatgacagccagctacaaacactgtttaattatctgctgcaatgcggcgatacctcccgtttcacccgttttattgaggagattgccgaacgtagtccactacaaaaggagagattaatgactattgctgaacggctacggcaggaagggcatcaaattggctggcaggaaggtatgcatgaacaagccattaaaattgctttgcgcatgctggagcagggctttgaacgtgagattgtgctggcgacaacccaactcactgatgctgatattccgaactgtcattaaaaggagagattaatgactattgctgaacggctgcggcaggaaggacatcaaattggctggcaggaaggtaaattagaaggtttgcatgaacaagccattaaaattgctttgcgcatgctggaacagggctttgatcgtgaccaggtgctcgcggccacccagctaagcgaagccgatctggcagcgaataaccactaattaacacaggcccacagccgatccccatgggcctttgatatcaataactaccttttatgcgtggcccatttttgccacttttaaacatcgccagtcgttgatccagggcatcgctgtagagcatcgtgtcaacgccaacagcgacaaagttcgctccccacgccaggcattgctgcgccatatcaggagccacagccagaaaaccagccgctttacccgcagcacggatccgccgaatactggtttcaataattcgctgcacttccgggtgcccggcgttatccgggtagcccaagctcgcagaaagatccgcaggtccaataaacacgccatcaatcccttcgacgtcgaggatttcgtccaggttatccagtgccgttttactttccacctgcaccaacagacaaaggctatcgttaacttgcgccatgtaattctcaatgcgtccccagcgcgcagcccgtgccacactggccccgacaccacgctcaccgtagggaggatagcgcgtggcagacaccacctgacgtgcctgttcggcagtatcgaccatcgggatcagtagagtttgcgcgccaatatccaggacttgtttaatcagcggtttactgccttccaccggacggatcacgggttggctggcatagggcgctaccgcctgtagctgatgataaagatcctgaatggtgtttggcgcgtgctccccgtcaatcagcaaccagtcataaccagaagtggcggcaatttctgccatataggcagtcgtactgcttaaccacagaccaatttgcacttcgcccttgcgtaaacgttctttaaagggattgcttaataatgcgttcatcgtgttccttaacctatttaatgatgtgccacgtcggtctgcgcaacagtgcgatttacacgcagagtgaaaataatcaggctaccgatgaccgccaccgctgccagcgtcagtaatcccgccgcatcgctggcaaataacgtttctgctttcacgcgcaggatcggggcaataaacccgcccactgcaccaaacaggtttacaaaaccaattcccgcagccagcgccgtaccggaaagcagttgtgtcggcatcgtccagaacactggctgcacggcaataaacccgatagctgcaacacacagcgctacgatcgccattactggagaaagcagcccggacagaccaataccaatgcccgccgccagtaatgtcagcgctgcgacattacgccgttcgccggttttatcggaatagcgcggaataagccaggtcccaaacaaggccgcaacccacggaatggcggtgaccacgctcgctgtaaagcccacttttgttcccagcaatgccgcaacctgggtcggcaggaagaaaattaatccgtaaaccgccacctgaatggtcaggtagataatcgctagttgccagactcggccattacgcagcgcatcgctcagccgagaagtcactttctgttgttcttcacttgccagttgattgataagcaacgttttttcttgtttactcagaaaacgtgcctgctccggtgtgtcatcaagccaaaagaatgtgaataccccagcaccgactgccaacaatccttcaatcacaaacatccagaaccagccgggatgccccataaatccatgcatctccaacagcgcgccggaaagcggacttcccagtgttaacgccagcggtgcgcccatatagaacagccccataatgctggcgcgattacgctgcggaaaccattggctggtgagataaatcataccagggaaaaatccggcctccgcagcacgaagcagagtgcgaactatcagaaatttcgcttcagtatcggcccatgccatggctgcgctaagaaatccccacagcagtgttgtcgtaccaatccaggttctggcccccagtttgcgcatcaaaagattcgccggaacacccagaaacgcatataccacaaagaaaatgcctgctcccagcgcataagcttcattactcaacccggtatcaatctggtaggtctgtttggcaaaaccgatattgctacggtcgagaaacgccagcacatacagcgccaacataaacggaattaaacgcacacggtttttcttcaccacggcgtcaagcaaagcggtgctcataaaaagctccttagaatatgtgggcgttaccgttgtcacagcaacgcccggagtgattagtggctgtaggggcgtttcaaattgcagtcatgattgagttcgacgccaaaaccgggtttatcaagcacacttttatgaatacgaccattcaccggaaccggctcattgagcagaatcgggtcaaactgcggacgcatcgtactacaatccgggctggtcatcaggaattcgctgaatggcgtattggtgaaggtgatcaccgcatggtgagagtaaacagagctaccgtgcggcaccaccagttgccccctggatttggcgattgcggcaatttccaccagcgtggttaaaccaccgcaccagccaacatccggctgcataatgtcgataccggtttcactaagcgtacgaaaagattgcagtgtgccgtggtgctcaccgctggtgaccatcattccgactggcgcgttgcgtttcagttcgcgataactttcatactgctgtggcggcaggcactcttcgatccatttcaggttatagggcgcgcaagcgtgggccagtttggtcgcatagttcacgtcctgactcatccagcagtcgagcattaaccagaaatcctcaccgcatttttcacgcatatccgcgaccatagcggcatctttgcggatccccgcatcgccatcatgtggcccccagtgcgtcggcattttgccaccgataaagcccatctcttttgccagatccggacgcgcacctgtggcgtagaactgaatctcatcacgaacagcgccgcctaaaagtttataaaccggaagcccgaccactttgccgaacagatcccacagagccagatcgacacaagaaatcgtattcatcaccaggccaccagagccggagtaatacagggtggcactgagcatttgatcgtggatcagtttgatatcactgacacatttaccctcaatgaaacggttaagatgtttttcgacaataaaacagcccatttcaccggctgtgctaacggcgaatccggtctggccgttttctgcttcgacttcaacaaccaacgtgccaagaacgttaatgccaaaactctggcgactctgctcgtaatcgcggtatttactcatcggggtggcaatatgatcgtctatccagtgattcgccccctggtcgtgataatcaccgccgccagcgcctttttctgctgtcgcaccgccagtaaaccaggcgcgaacctgtttaatttttggtagggtcatgatgttctccattgttaactggcttgtaagtcaaagggacttttccatcccaacagacgactaatatccctggcgcaggcaatggccttgcccgccagataatcacggtattcttcattgatttgtaagcgggtaccgaccacgctgatcgcagcggtaagctcgttattggcgttaaacaccggcgcagcgacacaacggacatcggcgtaatcttcgccgttgtcatagctccagccctgacggcgaatacgcgccagttcttcgtgaagttgctgtggatgagtaatcgttgtgggtgtcgcctgctcccagaccagcccttcgataatactttgctgtaccgctgcaggttgccaggcaagcaggcatttacctattccggagcgataaaggctaaggctttttccttcatgggaacgcacgctgatagtggcactactctccactttcaaaatgtaataagcgctgccgttatcaataatccccaggtgacataacagcccggtggtatccatcagttgcgtcaaacgcggtcgagccagttcccggagatccatcttgcttaacgcatgaccggaaagctccaccagcctggtccacaaacaaaaattttcctggtgatcaaggctaagaaaacgctgacgcctgagttcattaagcagcaaataggccgtgcttttagggattcccaatgtgtcaatgatcgtcgcagcactacaggggccaatgcgggcaatcaaattgagaatatcaatagcccgtgtcagggcgggaactttgctactttccaacatactggactccagtcttagatactggaatcagtctcgttgctcagggggagtaaaattgtgaagcgcatcaaatcccgctcctcgtccagcagactggagaaattacgcacaaatttgtgaatcagcgcacggattttttcttattgagtacaacaggttggacaaattttgccggagggggaatgtgccggtgcagtaaaccggcacagagtggcggaatcagacagataaggtcatggactcaacaacctcaatccagccatgctcactggcgatatcctggccgtttaaccaacggcgcagcatattcagtgccatcattgcgcacacttcctgacggatagccaggctgtagcgcgtagtgctgaaacgcacacgcagagcgaaagtgccgtctggcgtggctagcgcaaagttgagatgctcgttctcgaaaccgctaacagccagtgccagcccggcaaaatggttggcccgccgttctgtaatccagtgcgcagtttgcgccagggtttcctcctgactaggaaccacttcacacgccagcaatggagcacctgcgcgagaaagttgcaaagccaataaaccaccggtgaattgctcgctcaacgtcaggctgaactggcggttttgcaattcgcgactgatctgcgcgggcagtccttcagtgccttcgaaaatcacgctctgtccggcaacacgtttaacatccagccacagtttttccatcgcctgttgctcgcttgccggtccggtgagtttcagttcgatgataggcatactggagcgatagcccattgttacgcccggcggcagttgtagagtgtccaggctttgtgccagatcgctttcgctacgaccaaaagtagtcaaacgcagacaaaccggcggctgcggtaaagaaaaacgctcgcgcaggcgcggcaggatttcgtgctcgaccatcaccttaaattcactcggtacgccgggagtaaagaacatcaggcaacgattaagctgcacggcaaaaccacaggcggtgcctaccgggttattgataaattcagcactggcaggcagctccgcttgtttacggttgctcggtgccattactcgtccacgttcgtggaaatagcgttccatctctttgagccaggcttcatgcagcaccaggccttcaccttttgctgtcgcagcggcgagtgcgcttaaatcatcgctggtcggtcccagcccgccgttaacgatcagcacatcggcgtgctgactacgttcgcgaagaatggtgactaagtcatcaaggttatcccccaccgtattgcggcgagataatggcaacccctgatgaaagaaaaaatcggccagccaggcagcgttagtgtcaacgatttgcccgtgtaacacttcatccccggtggataacatttccacttttaacatggttatctcctgcttttgttatcgaatcactataacgcaaagggagataaggcgtagtaagaaactgaatggcgcgacagaatgccgcgccggaagggatcagaaactggcgttaaccccaacatacgggccgtcagccacggcgttgtcgcggttaccgtctttaccgctcagattcaggtagcgataacccgcctcaatactgactggacgcataatggtgtaacgcgcgccagcattcgcttcttcataactttgaataccgctggagaggctatccggagagtagtaatactcgccaaacaaacggaagctgttgccaattttccactgcaaaccacctcctaccgctgcggcataaccttcatcgccgtaattcgggttggtgtaaacgccttttccgccaacggtcgccattaacggcccgagaggcagattcaaccccagccccacgccagcgacatcaccgtcgtcgtcgttatgtgtccagttaccgcttaacgccaggcccgtcgtttcagtcccaaaaccgacaccaatattggtgtattctttacccgcctgaccgctgatgctcattgcattgacgcttgcagaaaccaacagcattccggccagacctgctagcgcaatttttttcattatcccctttcccacaagcaattaatcaaaattcccaaagctgcgggattgtactgcctggcacagaggattcaatgagcgaaaaaaaggatctagtcacttattgtaactaaatacttcttaaataattaaatgccgaaaaaataaacacactttatcgatacacacaaaaataataataagtacagttatcatcgcaaaagagattactgtcactttcacatatttgtgagttaccgtattctcatggtttctttttatttataaggaatatccctgtgcgacaacggactattgtatgccctttgattcaaaatgatggtgcttatttgctgtgtaaaatggccgacgatcgcggcgttttccccggtcaatgggcgattagcggtggcggcgtggagcctggcgaacgaattgaagaggcactacgccgcgaaattcgcgaagaactgggagaacagctgcttttgacagaaatcacgccgtggaccttcagcgatgatattcgcaccaagacgtatgcagatggtcgcaaggaagagatttatatgatttacctgatttttgactgcgtttctgccaaccgagaagtgaaaataaacgaagagtttcaggactacgcgtgggtaaaacctgaagatctggtgcattatgatttgaatgtcgccacccgaaaaacgttacgtttgaaaggtcttctgtaacaatgatgacagccattactggctgtcagattgaaaatttagtggttaacgaattccccatccagataaactttgcctttttccacatgcatgactaaaccatccagataatcaggtttaaatgtcgcgtcacgcttatctttagcaatatatgtcaggcaatgattatgggtgaaaataacgatatttttatcaggcgctttgctttgtaagtccttaattgcactataaatctcattaccgcactgaagaagtcgtttatctaccgtcaattttttacccgcactaaaccaggtagcgctctgaatggtccggacggtattactggaataaagatcgaaatcagggatatcagcactaaaagcgttgcccagttcacgggcatcctgggtacctttaaccgtaatacctgttttatcactcaagcattgattggtactacggtcgcaacgttcagcatgacgaaacaaaacgacaaccgggtgctgctgtgccagtctggccagtgttttattgtcgatacgtggcaaaccattgctactccaggcggcatgagtacccagtccggcaattgcagcgagcgccagtaaaatgatgatatattttttactcttcaagctagagcggcaaaaagctaacacgtaaactccacctatagacaagcgcaaccagacaattaccgtgaaattgagctacatttctggcgataattcgcagttggtgtaatattaaaaatcctacgatgtcggcaaaatgcctcaaaattttgccaaatgcaaagcctaaataagaaaaaatataaaaatttcaatatttacgtctaatattagtttcttaaggttaagttaatattctatccttaaaatttcgctccaaatggcaaaatatacacaacactctttatagcaaatataagtggacaggtattcaatggcggaaggaaaagcaatgagtgaatttttgccttttagccgaccagcaatgggcgtggaggaactcgctgcagttaaagaggttctcgaatccggttggatcacaaccggtccgaagaatcaggcgcttgagcaagctttttgccagttgacgggaaatcagcatgccatcgcggtcagtagtgccaccgccggaatgcatatcacgctaatggcgttgaaaattggcaagggcgatgaagtgattacgccttccctgacctgggttagtaccctcaatatgatttccttgttgggtgcaacgccggtaatggtggatgtcgaccgcgatacgctgatggtcacgcctgaagctatcgagagtgccattacgccacgcactaaagccatcattccggtgcattatgccggtgcgccagcagatattgacgccattcgcgccattggcgaacgttacggcatcgcagttatcgaagatgctgcccatgccgtcggtacgtattacaaagggcgacatattggcgcaaaaggtaccgctatttttagttttcatgccattaaaaatattacctgtgctgaaggtggcctgattgtaactgataatgaaaaccttgcccgccagctacggatgctgaaatttcacggtctgggtgtcgatgcctatgacagacaaacctggggccgtgcaccgcaggctgaagtcttaacaccgggctataagtacaatctgaccgatattaacgccgcgattgccctgacacagttagtcaaattagagcacctcaacacccgtcggcgcgaaattgcccagcaatatcagcaagcactggcagctctcccctttcagccattaagccttcccgcctggccgcacgttcacgcctggcatctgtttattattcgtgtcgatgaacaacgttgtggtatcagtcgcgatgcgttgatggaagcgttaaaagaaagaggcattggtaccgggttacatttccgcgccgctcacacacaaaaatattatcgcgagcgttttcccacgctgagcttaccgaataccgaatggaatagcgaacgcatctgttctttgccgctgttcccggatatgactaccgccgatgccgaccatgtcatcacagcccttcagcaactcgcaggacaataagccatgtttgaaatccaccctgttaagaaagtcagcgtggttattcccgtttataacgagcaggaaagcttaccggaattaatcaggcgcaccaccacagcctgtgaaagcttggggaaagagtatgagatcctgctgattgatgacggcagtagcgataattccgcgcatatgctggtcgaagccagtcaagcggagaacagccatattgtgtctattttgcttaaccgcaattacgggcaacatagtgcgattatggcgggattcagtcacgttactggcgacttaattattacccttgatgccgatctccagaatccgccagaagaaatcccccgcctggtggcaaaagccgatgaaggttacgacgtggtagggactgtacgccagaaccgccaggacagctggtttcgtaaaaccgctagcaagatgattaaccggcttattcagcgcaccactggcaaagcgatgggtgattacggttgtatgctgcgcgcctatcgccgtcatattgtcgatgcgatgttgcactgccatgaacgcagcacctttatcccgattctggcgaatatcttcgcccgccgtgccattgaaattccagtacatcatgccgagcgtgagtttggtgaatccaaatacagttttatgcgcctgattaatttgatgtacgacctggtgacctgccttaccacaacgccgctacgtatgctgagtctgctcggcagcattattgcgattggaggttttagcattgcggtgctgctggtgattttacgcctgaccttcggaccacaatgggcggcagaaggcgtctttatgctatttgccgtgctgtttacttttattggcgctcagtttatcggcatgggattactcggtgaatatatcggcaggatctacaccgatgtccgcgcccgcccccgctattttgttcagcaagttatccgtccatccagcaaggaaaatgaataatgaaaaccgtcgtttttgcctaccacgatatgggatgcctcggtattgaagccctgctggctgccggttacgaaattagcgccatttttacccatactgataatcccggtgaaaaagccttttatggtagcgtggctcgtctggcggcggaaagaggcattccggtttatgcgccggataacgttaatcatccgctgtgggtggaacgcattgcccaactgagcccagatgtgattttctctttttattatcgccatcttatttacgacgaaattttgcagctcgctcccgcaggtgcatttaatctgcatggtagcctgttaccaaaatatcgtggtcgcgcgccgctgaactgggtgctggtcaacggtgaaacggaaactggcgttacattgcaccgaatggtgaaacgtgccgatgccggggccattgtggcgcaactgcgcattgccattgcgccagacgatatcgctattacgctgcatcataaattgtgccatgccgcgcgccagctactggaacagacattacccgccattaaacacggtaatattctggaaatcgcccagcgcgaaaacgaagccacctgttttggtcgcagaacgccggatgacagtttccttgaatggcataaaccggcatccgtactgcacaacatggtacgtgccgttgccgatccgtggccgggtgccttcagctatgttggcaatcagaaattcaccgtctggagcagccgtgttcatcctcatgccagcaaagcacagccggggagcgtgatttctgttgcgccactgctgattgcctgtggcgatggcgcgctggaaatcgtcaccggacaggcgggcgacggcattactatgcagggcagccaattagcgcagacgctgggcctggtgcaaggtagtcgcttgaatagccagcctgcctgcaccgcccgacgccgtacccgggtactcatcctcggggtgaatggctttattggcaaccatctgacagaacgcctgctgcgcgaagatcattatgaagtttacggtctggatattggcagcgatgcgataagccgttttctgaatcatccgcattttcactttgttgaaggcgatatcagtattcattccgaatggattgagtatcatgtcaaaaaatgtgatgtcgtcttgccgctggtggcgatagccacgccgattgaatatacccgcaacccgctgcgcgtatttgaactcgattttgaagagaatctgcgcattatccgctactgcgtgaagtaccgtaagcgaatcatcttcccgagtactagtgaagtttatgggatgtgtagcgataaatacttcgatgaggaccattctaatttaatcgtcggcccggtgaataaaccacgctggatttatagcgtaagtaaacaattacttgatcgggtgatctgggcctatggcgaaaaagagggtttacagttcaccctcttccgcccgtttaactggatgggaccacgactggataaccttaatgcagcgcgaattggcagctcccgcgctattacgcaactcattctcaatctggtagaaggtagtccgattaagctgattgatggcggaaaacaaaaacgctgctttactgatattcgcgatggtatcgaggcgttataccgcattatcgaaaatgcgggaaatcgctgcgacggtgaaattatcaacattggcaatcctgagaacgaagcgagcattgaggaactgggcgagatgctgctggcgagcttcgaaaaacatccgctgcgccatcatttcccaccgtttgcgggctttcgcgttgtcgaaagtagcagctactacggcaaaggatatcaggacgtagagcatcgtaaaccgagcatccgcaatgcccaccgctgcctggactgggagccgaaaattgatatgcaggaaaccatcgacgaaacgctggatttcttcctgcgcaccgttgatcttacggataaaccaagttgacctaagatcttacggataaaccatcatgaccaaagtaggcttacgcattgatgtcgatacctttcgtggcacccgtgaaggcgtgccgcgtctgctggaaatcttgagtaagcataatattcaggccagcatttttttcagcgtcggcccggacaatatgggccgccatctctggcgactggtgaagccacagtttttgtggaagatgctgcgcagtaacgcggcaagcctttatggctgggatattttactggcaggtacggcctggccaggtaaagagattggtcatgccaatgccgatatcattcgtgaagcggctaaacatcacgaagtcggcctgcacgcctgggatcaccatgcctggcaagcccgtagcggtaactgggatcggcaaacaatgatcgacgatattgcacgcggtcttcgcactctggaagagattatcggtcaaccggtaacctgttctgccgctgcgggctggcgtgccgaccagaaggtgatcgaagcaaaagaagcgttccatttgcgctacaacagcgattgtcgtggggccatgccgttccgtccattgctcgaaagtggaaaccctggcactgcgcaaattccggtgaccttacccacctgggatgaagtgattggtcgggatgtgaaagcagaagattttaacggttggttactcaaccgcatcctgcgagataaaggcacgccggtttataccattcatgcagaagttgaaggctgcgcttatcagcataattttgtggatctcctcaaacgcgcagctcaggaaggcgtgacattttgccctttaagcgaactgttaagtgagacgttgccgctcggacaagttgttcgcggaaatattgccggacgtgaaggctggctgggttgccaacaaattgcgggtagtcgctgatgaaaagcgtacgttaccttatcggcctcttcgcgtttattgcctgctattacctgttaccgatcagcacgcgtctgctctggcaacccgatgaaacgcgttatgcggaaatcagtcgagaaatgctggcatccggcgactggattgtgccccatctgttagggctacgttatttcgaaaaacccattgccggatactggattaacagcattgggcaatggctatttggcgcgaataactttggtgtgcgggcaggcgttatctttgcgaccctgttaactgccgcgctggtgacctggtttactctgcgcttatggcgcgataaacgtctggctctactcgccacagtaatttatctcagtttgtttattgtctatgccatcggcacttatgccgtgctcgatccgtttattgcattctggctggtggcgggaatgtgcagcttctggctggcaatgcaggcacagacgtggaaaggcaaaagcgcaggatttttactgctgggaatcacctgcggcatgggggtgatgaccaaaggttttctcgcccttgccgtgccggtattaagcgtgctgccatgggtagcgacgcaaaaacgctggaaagatctctttatttacggctggctggcggttatcagttgcgtactgacggttctcccttggggactggcgatagcgcagcgggagcctaacttctggcactattttttctgggttgagcatattcaacgctttgcactggatgatgcccaacatagagctccgttctggtactacgtgccggtcatcattgccggtagcctgccgtggctgggattactccccggtgcactgtacacaggctggaaaaaccgcaagcattccgcaaccgtctatttgttgagctggacgataatgccgctgctgtttttctccgtcgctaaaggtaaattgcccacctatattctttcctgctttgcatctctggcaatgctgatggcgcattacgctttgctggcagcaaaaaataatcctctggcgctgcggattaatggctggattaacatcgcttttggcgtcactggcattattgccacatttgtggtctccccgtggggaccaatgaacacgccggtgtggcaaaccttcgagagctataaagtcttttgtgcctggagcatttttagcctatgggcatttttcggctggtacaccttaacaaacgtcgaaaagacctggccttttgccgcgctttgcccgctggggctggcgttgctggtaggatttagtattcctgacagagttatggaaggaaaacatccgcaattttttgtcgagatgacacaagaaagtcttcagccaagccgctatattcttactgatagcgtcggtgttgccgcaggtctggcatggagcctgcaacgcgatgacatcatcatgtatcgccagacaggtgagttgaaatacggccttaattatccggatgcgaaagggagatttgtcagcggtgatgagttcgcaaactggcttaatcaacatcgtcaggaggggattattactctcgtgcttagcgttgaccgcgatgaagatatcaacagtctcgccattccgcccgcagatgccatcgatcgtcaggagcgtctggtgctgattcagtatcgtcccaaatgatctggctaacattagtctttgccagcttgcttagcgttgccgggcagttgtgtcagaaacaggcaacctgctttgtggcgataaacaaacggcgcaaacatatcgtgctgtggctgggactggcgctggcttgtcttggtcttgccatggtgctctggctgctggtcttgcagaacgtaccggtaggcattgcttacccgatgttaagtctgaattttgtctgggtgacgctggctgcagtaaaactgtggcacgaaccggtaagcccgcgtcactggtgtggggtggcgttcattattggcggcattgtgatcctcgggagtacggtgtaatgggcctgatgtggggattattcagcgtcattattgccagtgttgcgcaattaagcctgggttttgcggcgagtcatctgccgccgatgacgcacttatgggattttatcgcggctctgttagcttttggcctggatgcccggatactgttactcgggctgctgggttatctgctttccgttttttgttggtataaaacgcttcataaacttgcgctaagcaaagcctatgccttgctcagtatgagttatgtgctggtatggattgctagtatggtacttcccggctgggaagggacttttagcctgaaagcactactgggagtagcctgtattatgagcgggttgatgctgattttcctgcccacgacaaaacaacgttactgagttttccctgccactttacactgccgttcccactcatcggggctataactgcttgcgctgaggactttcaccgtatgcagcttttcacgattaatacaataaagcgcattctgcaaagggctgagtaaatcccccactttcacggcgaagtcactcttcacttcggcgatcatttttatcgcgccgccagcatcgcagagcataagtacatgtctgttatcttgtttattgcagcagctttttttgaccagccattccattgcattatcctgtttgctaagagttttcacatcaatttacagattaacagataaactctttatcaacggcaatggaatggcagaaatgagaagtgaaacggagggttaattattgctgacgttgcacccactcttttagcgcctgacgactaattttaataccgccgtttttcagctccggcggcagagttagccagcgcaccggttgttgaaaacgggccagcttatctttcacccattcactaagatcaacgctctcgtggtcatactccatcaccgccaccggtcgatgaccaaactccttgtcggcaacggggacgataaacacctgcaaaaccgcaggatgtgcagcaattacgcgctcgacttcttccggctgaataccctctccgccactgaagaatagattgtctaaacgtccgacaatggtcagcttgccattatgcatctcaccgcgatcgcgcgtagcgtaccagccttcgtcattaaccagactaaccagttgcccgttacgccagtaaccttctgccatactggcagcccgcagccacacttcattattaacgattttcacttcccgacccggcagcgggctaccaacgtctgccaggccgtcggcttctttcgcacacaccgtggaggcaaactcggtcagaccatagccgcaaaagcaacgaatcccctgctcgcgcgcctgttccgtcaactcgaccgggatagccgcgccgccaagtaacaccgctttcagggaaacggaactacggttaaccagcaaacgccagagttgtgttggcaccagactagcgtgagtacagcctgccagcatttgctccaatggctgtttatcacgtaccgtcatccgcgcaccagcgtataaccagcgccacataattccctgaccggagacgtgaaacagcggtaaagagagcaaccaatcatcgtgatcgccaaacggaatcaggcttaacacaccttgcgcactggcaagatgggcctgataagtatggacagcggctttcggcaaaccggtagaaccgctggtcaacgtcatactgcacagacgcgtcggctgccacgtagcggcatgtgcgccttcaaccagctgaatgtgcaggctcgttaatgccggaaacgtgttttccccatccggcaccagagcaaattgcagcgtcagattgggcagcaattcttcaagcaacggttgcggcagctgagggttcacgggcaacacccgcgccccgcattgcagtaacgccagccaggcgagcagcgtttgcggcgtattccacgcccgcaacatcacgccgctgccctcaaccaccccctgcaccgcaaatccggaggctaattcatcgacgcgagcacaaagctcgcgccagttgagttgctcgtcattaagacgtaaggcgatggtttctccccgcacttgccgccagtgacgccacggccagtcagagaagatcataacaaccgctccagtgcatcaacttccacgacaggcagcgtgctacccggccagcgacgtacctgctgcgcctgcatcagatccagcgtgtccagccctggaatggtgtccggcgttaaccaggcggcaatccgcgccagttgcgttaagcctaagctgctttcaatggaagaactgatcaccgccgtcagccccagcgcgtgcgccgcctgtacctgctcgcgtactttttccagactgcccgtgagcgtgggtttgataactaccgcgcgcacgccctcttcagccacaaaggcaaaatccggctcgcgcaggctttcatcccaggcaatggcaatgccggtttcacgggcaaacgctcggctatcatcgcgggttttgcacggctcttcgagaaacgcgatgcggtcgcgataatccgggttaacgtatttggcaaactgctgacctttcagcggtgtccaggcgcgatttgcgtcaagacgcaaatgcagatccggaattgcctccagcaacagattcaccaccatgccgtcgcgcaccgcttcgtacaatcccactttgaccttcgccactttctcgcctggcatatctgcaagtttgaggatcagatcgtccggatcgccattacacagcggtgccgcacggtagttggctgcttgcggcaacgtatctgtcagttctgccaatgcacagcttacgccaaaggccacggaaggcatctgcggtagctcgcaatcgcctgccagccagttatttacccaggcaagcagcacactttgcgcctcttcccaggtttcctgactgaagcccggcagtggggagatctccccccacccttcgcgctcgccttcacgcaggcaaacatacagcccgtcgcgggtttttaaccgcctgtcgcgcagaaccacccccgcgtccatggggatctgccagcggtatacctgcgcgctacgcattacggattccgtttgaatttgctgaagtcaggctgacgtttctggttgaaggcgttgcgaccttcctgaccttcttccgtcatgtagaacagcatggtggcgttgcccgccagctcctgcagccccgcctgcccgtcacagtcggcgttcagtgcagctttcaggcagcgcagcgccatcgggctgttttgcagcatttcgcggcaccaacggacggtttctttttccagatccgccagcggtaccacggtgttcacaaggcccatatccagcgcctgttttgcgtcgtactgacggcacaggaaccagatttcacgcgcttttttctgcccgacgatgcgagccatgtaggaagcgccccagccgccgtcgaaggaaccgactttcgggccagtctgaccgaagatggcattatctgccgcgatagtcaggtcgcacatcatgtgcagaacgtgaccgccgccgatggagtagccagccaccatcgcgacaaccggtttcggacaggtacggatctgacgctggaagtccagcacattcaggtgatgtacgccggaatcatctttatagccgccgtaatcaccacgcactttctggtcaccaccggagcagaacgctttatcgcctgcaccagtcagaatgatcacgccgatgttgtcgtcataacgcgcatctgccagcgcctggatcatctcttttaccgtcagaggacggaaggcattgcgcacctgcggacgattaatggtgatttttgcgataccgtcggtggatttttcataacgaatgtcctcgaaaccttcggagcagtcgtgccattcaaccggtgcgtaaagcattgcttcatcaggataaatcatattgtgtcctttagtcagaaacgcaagatctgcgccagacttgcgattacgccagcgggattttcccgatgcgcgttatgtccggcgcgaggaatgacatggcagtcggcagccagttccgccgccagggcgcggaatttgctgtcacgttcaccacataaataataaaacgcaaatgtgcgggcgctaaggttagcacgtaaatcaggctggacggcgagagaagtcgcctccagcatggcggcaagcgttgcgccattattgttgctgcgcagcgccaccagctcccggcgttgatcgtcattgagactggcaaaaacaggctgttgataccagtcggcaaataccgccgttaacggttctgtgagaaaacgctgcacccattggcgatcggaacgctgacgttccgcacgttgttcagcattttgcagccccggatgcccgccttcgacaataaccccacaaagccccgccagcccctggcaagccgccatcatcgccacccgtccaccaaggctgtaccccaccagccagaagtcaaggatgttgtaactaaccaaggttttacgcagtaagtcggtgacatcatcaaatccatcgacgctaatcgccgcgctaccaccgtgacctgggagatcaacatacaaccgactgtagtcggcaaacgcctcgcccacttcttgccattcgtggcaatcgccggaaaaaccgtgcaaaaacaccagccagggtaaacctggttttccgtgttttgcctgcgcgtgcaggatcataaatggcttacctgcgccagaagttgctggagcgtttgcgcaccatcggtgtcgttaaccaccatttcaatcaccgtggtggttggcgtgcgccaggcgtcggcaaatgccgtttcaagttcctgccagttttgcggacgatgatatttcagctcgaacatcgcggcggcgtgctcaaaatggacgttttgcggcatcagatagaaacgctcacgctcgctttgcggcgttggcaacaggctgaaaatttgcccgccgttgttgttcaccacaattaataccagcggcgcagaaacctgacgcaataacgccagcgcgttgagatcgtaaagtgcggagagatcgcccacaatcgccagcgtcggtttgccgcttgcccgctgaacgccggcggcggtgctaagcagcccgtcgataccgctggccccacggttgctgtacaccgggtaacctgccggaagttggctaagcgcatcaatcagacgtaccaccaggctgttaccaacaaacaattgcccctgttcaggcagatagtcgcagatgcgatgcgccagttgcgcttcgccaaacgcatcacggcgggcaataaccgcctgcattgcctgttccgccaggcgcgggatttcaacgcaccagggctggcgtttttctgccggatgcagctccagccagtcggcaatattggcaattaagcgacgtccgcgatggtgtgccggatcaagtcgcccttcaatgtcatcaacaatccagtactcttctggttcacagcttgcctgccattgcaggagccgtttccccgtcaggctgcttcccagttgcaccacaatttgcgcctgctgcagctcgctggtcgctttggcattgcctaaccaaagatcggcacacggcagcggctgcccggtttgactcagcacatcgccaatcagcggccagccaagagtttgcgcccacagggcaacttttttgccctcttccgcactcatgcgcccggcaaccaccacgccgcgcttttgtcgccagaagaaccagtcgcgctgtttttcactttccagacgaggcgcttcacgcagccacggtttgtcttcctgccaccagtcacccagacgctgttgccagctaagcccggtatcgtccatttcgccatacagcggttcagcaaacgggcagttgatatggactccccccgcatgaagcgtaccgagagcgtggtcgatggtagaaaccagccaacgtgcggggatatcctgggtcgggcgcggcaaactaatactgtgcgtggggtgagaggcgaacattcccggctggcgaattgcctgattcgcgccgcagtcaattagctccggcgggcgatcggcggttaagagaatcagtttttctccggttaacccggcttcaatcagtgccggatagagatttgccaccgccgtgccggaggtcacaatcaccgccaccggctgcttgctgactttcgccagccccagcgccagatgccccaacccacgctcatcgaaatgggtgtggtgaatgaatgcggaattctccgccgccgctaacgttaacggtgtagaacggctgcctggggcgatacagatgtgtctgacgccgtgacgcgttaatgcttccagaatgaccgccgcccagcgtcggttaaatgcgcttacactcatgagtttgtccggtatcaatattgcggctaagtataaggagctacaaaaatagattattgatatgaatcggtaatgatgcgactcattattattccatttgtaataaagtacgcagccctgccgctttgttgtcgatttcctgccactcttgctcggggtcggaaccacggacaatgcccgcgccagcatataatcgcacgacattgccgctaatttttgcactgcgcagggaaacgcagaattcgctttgttgtaaactgagatagcccgcagaaccggcgtaccattctcgggtgaacggttcgtgacgggcgataaactgtcgcgccagatcgcgcggtaagccagcaactgctgccgttggctgcaactgatgtaaacagatcacatcatccgctttgttgagactagtccagatacagcggcgaagatgctgcactttacgcagacgcagtacctgcggcggtaaaacatccagcgtctgggtatcggcctgtaatcgttgacagatatcttccaccaccagcatgttctcgcgctggtttttatcatccgccatcagccactctcctaactgctgcgcctgcttatcatcaggattatttgctactgttcccgccagcgcttcagtacgcagcgctttgtcacgccgccgccataaccgttccggactagagccaagaaaagcattttcgccatcaaaggccatgtaaaaatggtagcaattcagattcagtcgacgactggcagccatcatcgccgccgcgttgaccggacttgcgaaatgcaggtcagttgcccgagcgagcaccactttgtcgagctcaccttcggcgatggttttcgttgccagttcgattaattgcgtccagcccgttttgtccggccagtgttgttctcgcgtggtggttaaatgtaacccaggcaagggcttgatactcaccagtgtggcgataaattcttttgcctgaatcgcatcgtgctgaagggagctttcgctgaatagcgtcagccgcagcgtggctttaccgccacagcgtcgccattccaggcggggtaaaagtaaattgccctggctcgggtcaaaagcattcagcccccaaatgcgtaagtcggcgtgttccgggtgctggcgaagaaaacgttgtgcctggtccaagctcgtaaaacgggtaatcgcgcccaggacgacagcttcttcatcaccattacgttgttgccagtagaattgcgggtatgtttgctgactggccagccagctcaaggcatcaaaagcgtctttgagagggaaaggaatatcgataacccgaatgccgggtgtcgccggaatctcttggctcaaatggcgcagtagattttccagcgccgtagtaagactttgcacgcggacctctccctgttaaaagcctcacattatacggggtactacaaaaaaaatgcagtaccccggtgtagggaggttttaacggcgtgccagcaacagtcctagtaccagcccaacggccgcgcccacaccaattccttgccagggtttttcgtggacgtagtcatcagcacgataaactgcctgcttcgcccgatagtaataactgtcactagcctggctaacccgttttttcacatcatccagcgctttttctgcacgcgctttcagctcaacatatttctgatcggcgggatcgccagaggagcggagcacctcttccagtgtttcactaagcagcgtcaggtcgtcatcgatacgtgtatcaccaaactgattagacattctcgttctccatttgcgtaaaacctgtcactaactatagacaagggttgttgattacgcctgaattacctcgcgtgccatcccaatgtgtgggataccatcttcttcatagacctccgtcacagggataaaaccgaaactctggtagaagttttgcagatgcgcctgcgccccgaggtaaacaggcttatcaggccagtgatgcgtacatgtttcgagtgttttactcatcagctgctgccccactttttcgccacgcaacgcttcactgacaatcacccgacctataacgaccggctcaagatcatcatcacttttcagaatcctcgcatacgccaccagttcatcatttttccaaccgagaatatggcgattatcccccgtcaaatcatcaccatcgatatcctgataagggcaattctgctcgacaacaaacaccgcgcaacgcagttgtaataaggcataaagctgggaaacgcttaattcagagtgatgcagatcttgccattcaatcataatgctctccttttagatgtatgccttatactagccggaatattttttgaaacgtgatgaactcatggaattaatttttttaggtactagtgccggtgtgccaacccgcacgcgcaatgtcacggcaatattgcttaacctgcaacatccgacccagagcggactttggttgtttgactgcggtgaaggcacccagcatcagctactgcataccgcctttaaccctggaaaactggacaagatttttatcagtcaccttcatggcgatcatctttttggtttacccggcttgctgtgcagtcgttctatgagtggcattatccaacccttaacgatttatggtccgcaaggtatccgtgaatttgtggaaaccgcgctgcggattagcggcagttggaccgattatccgctggaaattgtcgaaattggcgctggcgaaattctcgatgatggcctgcgcaaagtaaccgcttatccgctggaacacccactggaatgttatggctatcgtattgaagaacatgataaaccgggtgcattaaatgcccaggcattaaaagctgctggcgtgccgcctggcccactgtttcaggaattaaaagcgggcaaaacaatcacgctggaagatggaaggcagattaacggcgcagattacttagctgctccagtgccaggtaaagcgctcgctattttcggcgataccggcccctgcgatgccgcacttgacctggctaaaggtgtcgatgtcatggtgcacgaagcgacgctggatataaccatggaagccaaagccaatagtcgcggccatagctctacacgccaggctgcgacactagcccgtgaggctggagtcggcaagctaatcattacccacgtcagcagccgctatgatgacaaaggttgtcagcacctgttacgtgaatgcaggagtattttcccggcgactgaactggcgaatgatttcaccgtgtttaacgtttaactctgcttattattaaaaacagggcgaaacttgccctgttatcgcaacccgcgctacatatatccacccacacaggcatattgagcgatttttgatatttattcatctccttacgcactatattcagagcaataagttgcctcttttcatcttgattcagcacaacctttgcaactaaaaggagcccatgatggttacagttgtcagcaattattgtcaattatctcaaacgcaactcagtcagacatttgcagaaaaatttactgtgaccgaggaattactgcagtctttaaaaaaaacagcgttatccggagatgaagaaagcattgagttactgcataatattgcgttaggttatgataaatttgggaaagaagctgaagatattctttaccatattgttagaaccccaacaaatgagaccctaagcattatccgacttatcaaaaatgcttgtttaaaattatataatctggcacatatcgcaaccaactcccccctcaaaagtcatgatagtgatgatctcctgttcaaaaaactattctcccctagcaaattaatgacaattatcggtgatgaaattcctcttatatctgaaaaacagagccttagtaaggtgcttttaaatgatgagaataatgaactgagtgatggtacaaacttctgggataaaaatcgtcaattaaccacagatgaaatagcttgctatcttcagaagatcgccgctaatgcaaaaaatactcaagtcaattatcctactggtctctacgtcccctactccaccagaactcacctggaagacgctctcaatgaaaatattaagagcgatccaagttggccgaatgaagtccagttattccccataaatactggcggacactggatattagttagcctacagaaaatagtaaataaaaaaaataataaactacaaataaaatgcgtcatattcaacagtttgcgtgcactaggctatgataaagaaaatagtcttaagcgtgtcattaatagttttaattctgaactcatgggagaaatgagcaataataatataaaagttcatttaaatgaaccagagataatatttttacatgccgatcttcagcaatacttaagccaaagttgcggtgcatttgtgtgcatggcagcccaggaagtgattgaacaaagggaaagcaattctgacagcgccccctatacgttattaaaaaaccatgctgacagatttaaaaaatatagtgcagaagagcagtacgaaattgattttcaacatcgactggcaaacagaaattgttatttagataaatatggcgatgcaaatatcaatcattattatagaaacttagaaataaaacacagtcaacccaaaaatagagcatccggcaaaagagtgagttaacatcattgttaattaattcgaccagtcagcaaatatgctgactggtcgaacatagtttgctaaacagtcatcactgactgatgtcagtcacaccatccgccagttcaatcaggcgaataaattccgccctgtaaccctgtggatcttccccttttgcctgctgagcccactgtttgatctgctgccaggaggtattgttcaggtattcagaaccgcgtaacttttgcccatatgcagctactgctgcgcgaaaacgcatatcttcagagggcgcgtttattgttggccccagcgggaattcaactaactgactttcttttccctgcgggtatttccagcgaatttttaaccaggccagttctttcgttttgtcgcttttcgctaatttgttatccggggcatagcgtaacttatcaatacttgctttttgcccgttcagcgttaattcgaataacaacgttatatgtttgcctgcgcctatatcccctgcatcaacgttgtcgttattaaaatgttccacccgaagttggcgcttttcataaccaatctgacggtattccgttacccacgcggggttaaactcaatttgcgctttgacatcttttgctacggtaatcaacatctgccgcatttcactattcaatactttctgcgcttcagagagggtatcaatgtagctgtagttgccgttaccaacatcggcaattcgcaccatcattgcctcgttgtaattgctattccccacgccaaacgtgctcagagtaacaccagactcccgctgttttttgaccatactttcaatgctttttggatcgtcaatgccaacgttaaagtcaccgtcagtggctaataaaatgcgattgatgccgcccttaataaaccccttcgtcgcctgctgataagccagttccagcccggcaccgccattggtactgccttcggcatccaggctatcaattgcggcattaatttccgccttatgactcccggagatagaaggcaatgcaatacgggagtcgccagcgtaggtcacgatggcaatgttatcctgctcacgaagttctttgaccaataatttcaagctagactggataagtggcaaacgttcatcagaaatcatactaccagaagtgtcgataagaaagaccagattagaagctggtaactcttcacttttgcgatctttcgccaggatatcaactttcagcaatgttcgctgttcattccatggtgcaggtgccaattcgtagcgcatagcgaaaggtattggcttagaggccggaatagattgtttgtctttgatatcccaatcagacgggaaataattgactatctcctccacccgcacagcgtctggcggaggtaacagcccttgattgaggaaacgccttacattcgcataactgccagtgtcaacgtcaagactaaacgtcgccaacggattttgcgctacctgcttaaccggattatcatcgaactgctggtagcgagcggttcctggatttgcgatatgtgtagcttttgctttagccgctcttgcaaatgttggcgcttcctgcaatcgcccctgtaaagcctgtttgtcactatattgttgcacttcttgctgggccaaggctttcgcggcggcggcgctttgctcagcctcttttattgcagcttgctgcgcggcaagcacttgctgctctgtgggagtactgggttgttgttgctgactttccttattctcaggttgcggcccacatccactcaaaatcaaactactcataagcaacatgattatatttttatttcgcatataaaatccttttaaataaactcaggcaccagacataaaatatactctttgtataatcctgctaatcttaataaaatacaatatcgaaacccatagcaaataatgattcaacaacgcaacccattaataatttgcatatgaaaaaaataatctttgcttttattatattatttgtgtttttactccctatgattattttttaccaaccctgggtcaatgcattaccgagtacgccccgacacgcaagtcctgagcaattagaaaaaacagttcgttatcttacacaaactgtgcatccacgtagtgccgacaatattgataatctgaataggtccgcagaatatataaaagaggtctttgtcagtagcggtgccagagttaccagccaggacgtccccattacgggtggcccctacaaaaacattgttgctgattatggtcctgccgatggaccgctgattattattggtgcgcattatgactctgccagcagttatgaaaacgatcaattgacctatacgccgggcgcggatgataacgccagcggtgtggcaggattactcgaactggcacgtttgttacatcagcaagtaccgaaaacaggcgtgcagctggtcgcctatgcgagcgaagaaccgcccttctttcgtagcgatgaaatggggagcgcggtgcatgcagctagccttgagcgtccagtgaaattaatgatagcactggagatgattggctattacgactctgcgcctggaagccagaattacccttacccggcaatgtcctggctttatcccgatcggggagactttattgccgtggtcggcagaatacaggatatcaacgccgttcgtcaggtaaaagcggcattgttgagttctcaggatttatctgtttattctatgaataccccagggtttattcccggtattgatttctctgaccacctgaattattggcaacacgatattcccgccataatgattactgacaccgctttttatcgtaataaacaataccacttgcccggtgataccgcagacagattgaattatcagaaaatggctcaggtagtggatggtgttataactttgttatacaacagtaaataataaaaatttctcgaggcgggtccagaaaaagcgacatgcacattttattttccctcatctgttttaagatgcgaaacatgaaattcaacggaggaaaaataaatgggaatgattggctattttgcagaaattgacagtgaaaagattaaccaactgcttgagtctactgaaaaacctttgatggataatatacatgacacgcttagtggattacgccgactggatattgataaacgctgggattttttacactttgggctgacaggcacctctgcttttgatcccgcgaagaatgatccgctgagtcgtgccgtgcttggtgaacacagcctcgaagatggcatagatggcttccttggattgacctggaatcaggagttagccgcgacaatcgaccgactggaaagtctggatcgaaatgaactgcgtaaacagttttccattaagcgactcaatgaaatggagatttatccgggagtgacctttagtgaagagttagaggggcaactctttgccagcatcatgcttgatatggaaaagctgattagcgcgtatcgacgtatgctgcgacaagggaatcatgcgctgacggttattgttgggtgatatagcttgatgcctgggggagaaagacccattagttaagatttacgccaggatcatcttgaaaaaatctttaaccatggtccggtttttatccccttgtataaatattactaaatgcttgcttagtcgcattgttaaatgcaataccgtatattcggtatgtaacagcgatatcctctgtgctggcaacgatctgtcatgcttgatgaaaacggaattgaacctgtcattaccaggtagataaaaagcctgttcaattttgggattattttttataactcgtgtctgttatggcgacacgggaaaacatcaatattgtccttcacaaattgcagtaatatagaatcaacctctcttgcaagttggtcacaatgtattataagcattttgaatatgtcatcctctgtaatctcgtgaaaattttcggccttgtcttttagctcatcatatcggattcttgcagtaaccattttttgggcgagttctaataaccccaaagcttgcaattgctggtgagtatgatcactttcaaaaaatatcccacactccattccttcccaaccaacatattcatgccattcataaaccagcataaatgtttgtaaaactggcggtaataattggatatctgcaaaaccaaaccaaaacttacgcttgagatcccactcatattcaatcgccaatgctatattgtttaaggcatctccggcatccttatttttacgcaaaatcaattccgtcagtgtatagcgttgttcatcaatacgccgaagagcttctgcaatatcatagtttgtagccaacaaaacattctctgcttcctgatgagtgacgtctgcttttgccgtcaatatattgatttggtcaatatgaaacaacttgatggcttcatcaacatcaccgccagtcctctctaacaaacgtctggcaacctggataccgacaggtacgttcttccgaagtttacgaatttcacttaaccattccatgtcaaacccctttaaatatttatgatattaaatataacaacgtctggataacgacccggcctgactgaatatctcacgttttcctgcttaacattcatgttatgatgctcttgaaactaataatacgtatggaattgtcactatttatctgctaatgaatagtaacaatgtcattcgtttgatgaatatattatttcagggaataattatgacacctttagaacgcattacccaacttgttaatatcaatggtgatgttaataatcctgatactcctcgtccattgttatctcttgaggatttttttattgacaataatatccatggtagtatatgttgcaatgtgattccagaacaatctccgcaagctatctatcaccattttctgaaaatacgtgagcgtaacaatgttagtgatgttttggtagaaattacgatgttcgatgacccagactggccctttagtgaaagtattttagttatcaccactgctagtccagaagaagttcagagctggtttgtagaagaaattgcccctgatgagtgctgggaaggatggagtgaagatacggagcatggatgggttgaagtccctgtgggtatgcatccggttacttgttggtgggattaaaacatttatataaacagataagcggatgtttacataaatttttatgtgaaggaacatgatgaaacttattcctcgcagtagtgatattagtcctggcattgatggaatttgcccggggccttttcctccgaacggatttaccgtacttacagatgcagcatatggtaacggagactgtttcggtttgtactggcctattggtcaggagcataaactacctatagtgtgcgaaacgtaccatgacgaatggcgaatcgtacctgccttttccagcattaagaagttcgaagaatggctggaagtgaatgatgatgatccccatgaaaatggcatcagcatcgaagatcaagactttgcagcaaatctcttccgtgttgctcggaaatgtcttagtacgggaaggcttgatgacgcactgccactgttacagcgagcaacagaacaattgcctgaagtcagcgaatattggttagcactggcaatccagtatcgccgatgtaaaaaaacagaagctgcagcacaggctgcgcttaatgcttatcttggcaattgggcatttggtgttcctgacaataaagtcattcatttgctgagtcaggccgcagatgtcccgaatttccaggatgatcctgtgattcagtgcattaaagaacaaggattagatcttagctttggaggaacaaaggaaaataataattaccccttgatgcagatgtgtgttgatacttattttgcgcagagaaaaccgcttcaggcattaaccctgttacataattatgcctggataatgtccagtgaaacgactgcatttcaggaacgctatgattttaatatcgatgaatggcgggcaaaattcaggcagttatgtttagagtattttggcgatagtcgtacacagttcacttaacgctctgcgtctatctactatcccttctttttcagaaaaaccgccgagcatgtcggcggctttctgacttacaaagtaacagattacatcagcggcattgccaaacgcacaatgctaatcagcggttgtggccatacacccagcaccagtaccaacagtgcagagatcagcacaacgataccgcccgcgctgtactgccagttacttggtgcatcgcgacccggttgttccggggcgtgaagatacaggctcaccgccacgcgcaggtagtagtagaggccgattgcgctaccgacaaccacggcacccaccagccaccacaagtgtgcctggacaccgaccgccagcacgtagaacttaccgataaagcccagcgtcatcgggataccggccagagacagcatcatcaccgtcatcactgccgcgaggatcggacgatgccagaacagaccgcggtaagagaacagggaatcagcatccgggccacgatacgggctggacatcaggctgaccacgccgaacgcgccgaggctgctgaacagataaccggccaggtaaacccctaccgcttccatgctcatctcgccggtttgcagcgcaatcagcgctaccagcagatagccgaggtgagagatagaactgtaaccgagcagacgtttgatattggtctggctcagcgccatcaggttaccgaagatgatggaggcaaaggcgataatcgccagcaccacgcgaatcgcttcgctgtcacccaccggtgcgtagaggaacagacgcatcaccacaccgaagatagcgattttgctcgccgtcgccaggaaagtggaaaccggcgcaggcgcgccctggtatacgtctggcgtccacaggtggaacggcaccagagagagtttgaagccgaggccaacaatcatcaggccgaaacctgccagcaacagcggctcgttgagcataccgtcgccaaggtttttacccaacgcgacaaagctcaggtcgccagactgcgcatacaccagcgccataccaaacagcaggaaagaagacgctgcggcagaaaggatggtgtatttgatactggcttccagactacgtttctggcggaaagcgtaaccgaccaggccaaacagcggcaaagagatcagttcgataccgaggaacagagacgccagatggttggcattcgccagcaggatcccgcccagcgcggcaattaacaccaacaggtagaactcatccttgttgtcgttatagccttcaagccacgggtaggcgaaagtacaggtggcgaggctcgccaacaataccagcccggtgtaaagcatggcgaaaccatcaacgcgcatcagcggcgtaacgtccatagcgcccgcctggccaacaaaccagagcgaaaccagcgccgcgttaagcccaataaccgagagcgtagcgttgaggaaatgattgcgtcgccacgcaatggagagcatcacaaccaccaccgtcaagccgacgatcagcaacggtagcagtgcgatcaggttttgtggagttattgtcatggcgatttacggccttgtagtagtaacggaattaacaaaccactgctggatattgccaatcgcggagtggctggtatccagaatcggctgcggatagaagcccagcagtaccagcagcaccaccagcaacaggatcataaacagctcacgcaggctcatccctggcagttcctggctggcaatctggcttttcgctttaccgaagtaagcgcgatgtaacatcgccaggctataaacagatgcaaagaccagcccaaaggtagagataacggtaatcaccggtacaacctggaagctgccgaacagaatcataaattcgccgacgaagttaccggtgccaggcatcccaagcgttgccaccgcaaagaacaggctcagtgctggcagccatttcatcttgctccacagaccgcccatcatgcgcatgtcgcgggtatggatacgttcataaagctgaccacaaagaataaacagacccgccgcgctcaaaccgtgcgcaatcatctggattaccgcgccctggtaggccaactggctgccggtgtagatagcaatcagcacgaagcccatgtgggaaacgctggtgtaggcgatcagacgtttgatatcggtctgggcgaaggccatccacgcaccgtagaagatgccgataacacccagccacatagcaattggcgcgaactctgcgctcgcgttcgggaacagcggcagggagaaacgcagcaaaccgtaagcggcagttttcagcaagatccccgcgaggtcaacggaaccggcggtcggagcctgggagtgcgcatccggcagccagccatgcagcggaaccaccggcattttgactgcgaaggcgatgaagaagcccagcattaacaggtattccacaccactggacattggcgtattcagcagctcttcatagttgaaggtccagacgccggtcgcattgtagtgaacaaaaaccagcgccaggatggcaatcaacatcaccaggccactcgcctgggtgtaaatgaagaacttggttgccgccgtgatacgcgttttaccgtcagaggctttatgcccccacagtgcgatcaggaagtacatcggcaccagcatcatttcccagaagaagaagaacaggaacatgtcgatggcaaggaacacgccgataacgccgcccaggatccacatcaggttgaggtggaagaagccctgatatttttcgatctctttccagctacatagtaccgccagcacaccgagcagaccggtcagcacgaccatcagcaggctcagcccgtcaatggcgagatgaatagagataccaaaacgcgggatccacggcatgtcgaattcagactgccactgcggaattccggcggattgcgtcagactataaccgccctgcaaccacagttgcaggctcagcgccagcgtcaatcccatggtgatcagcgcgatccagcgtggcaccttgacgccaaagcgttcggtctgccagcacaggaagccgccaataaagggaattaatattagccagggtagtaacatggcgatctttattccttgtaaaagtcccgtcaggaccggattttcaacgaattctcacgacagaaaattctcttcggactgggggtagtgtcggatgcaccgcgaaggcggcttatccgacctacgttcttatatgcccaggggcaatcccacaatccttaactcaacgcagtaccatcaacagtgccagcaccacgaccgcaccgatgctcatggatgccacataccagcgcagatagccgttctcacttaacagcagacctttacctgcaaagcgggaaaggacagccgggatgttcatcatactgttcagcggatcgcgtttcagcaaccaggcaatacccaggaacggcttgacgaacactttgtcatacagccagtcaaatccccaggcgttgtaccaccaggtgcccagcagacggcccggcgcactgttggcgatggaggtcaccagagtacgtttacccagccacagccaggctgccagcagaatgccgaccaccgcgaccacgccagaggtaatttccagggtcaacatgctgccgtgcgccagttccgtcgtttgcggaagcacgccctgcagcggcggtacaatcagtgcgccaacgaaggtggaaaggatcagcagcacaatcagcggcaggctgtgagttacccctttcacggcgtgagcgtgaatttgttcttttccgtggaagacgatgaaaatcatacggaaggtgtagaggctggtcataaacgcaccgaccagacctgccaccatcagattgatatgaccattcgccatcgcacccgcgaggatctcatccttactgaagaagcccgcagtgaccagcggtagtgcgctcagtgctgcgccgcccaccaggaagcagagataaaccagcggaatagatttacgcagaccgcccatcttgaagatgttctgttcgtgatggcaggccagaatgacggaaccggatgccaggaacagcagcgctttaaagaacgcgtgggtcatcaagtggaaaatcgccgcatcccatgcctgcacgccaagcgcgaggaacatgtagccaatctggctcatggtagagtaagcgagaacacgtttgatgtcggtctgtaccagcgcggcaaaaccggccagcagcagcgtaaccgccccgacaatacccaccagatgcagaacttccggcgtcatcaggaacaggccgtgggtacgggcgatcaggtagacacccgcggttaccatggttgcggcgtggatcagcgcggagacaggcgtcgggcccgccatcgcgtcggcaagccatgtctgcaacggcaactgcgcagatttaccgaccgcaccgcccagcagcatcagcgtcgcccacatcagcatgttattgccgtcagcaaagtgcgctggtgccagttccaccatttcgcggaagttcagggtgcccagttcgttgtaaagaatgaacagtgcgaaagcgaggaacacgtcacccacacgggtcacgacgaacgctttcattgccgctgcgccattcttcggatcggtgtaatagaacccgatcagcagataggagcacaggcccacgccttcccagccgaggtacatcagcagcaggttgtcggcaagcaccagaaccaccatgctggcgatgaacaggttggtgtaagcgaagaagcgagagtagccctcttcaccgcgcatataccaggaggcgtacatgtgaataaggaaacccacaccagtgaccacgctgagcatggtcaggctcaggccgtccagcaccaggttaaaaccgatgttaaagtcgcctacgctcatccacgtccacagcggctggctgtatgtctgctcgccgttagcgaagaaatcaacgccgataaaggcggttaccagcgccgccaggcccacagagcctacgccgacgatcgcgctgacgttttcagaccagcgcccacgggagaatgccagcaggacgaagccaatcaatggcaaaataatggttaaggcaagcatgttcatccgcgcatctcacttacactatcgatgttcaggttctggcgacgacggtgaagttgcagcagcagcgcaaggccgatactcgcttctgccgccgcgaggctgatggcgagaatgtacatcacctgaccgtcggtctggccccagtagcttccggcgaccacgaaggccagcgcggaggcgttaatcatgatttccagaccaatcaacataaacagcagattgcgacggataaccagaccggttaagccaagaacgaataagattgccgcgaggatcagtccatgttgtaaggggatcatgcgtgctcctccgtttttcttttcgcgctgtcgtctttacgattgctcagcacttcacccgcacgctcttcacgaccgacgtggaaggccacaaccagacctgcgagcagcagcatagaagccagttccaccgccagtacgtaaggcccgaacagcgtaatacccactgctttagcactgattggcgtaccgtcgataccctgatcgttaacaccgaggatggcgtaaacaatcaccaccagcatgatggcgctcaaaattgccggaccaatccacacctgcggtttcagccactggcgttcctgttcgatttcactaccgcccaggttgagcatcatcaccacgaacacgaacagcaccataatggcacccgcgtagacgataatttccagcgcaccggcgaagtaagcgcccagactgaagaacaccccggaaatcgccagcaggctaataatcaggtacagcagtgcgtgtaccggattggtatgggtgatcactcgcaaggtcgcaagtatggctatcaggccacagatataaaaagcgaactccattgcccctctccttacggtaacaggctcttgacgtcgataggcttggcttcgttctctgcttcgcccttatctttgccgtcgattgccatacctgccatccggtagaagttatattccgggtatttgcccggaccggagatcagcagatcctctttctcgtaaaccagatcctggcgcttgtattcccccatttcgaaatccggggttaactgaatcgccgtggtcggacaggcttcttcgcacagaccacagaaaatgcagcgactgaagttgatgcggaaaaattccgggtaccagcgaccgtctttggtttctgctttttgcaggctgatacagccgaccgggcaggctaccgcgcagaggttacaggctacgcaacgctcttcgccgtccgggtcgcgggtcagaacgatacgaccacgataacggggcggcagatagaccggctcttccgggtacattcgcgtttcgcgtttggcgaacgcgtgcaggccgatcatccagatactacgaacctgggtgccgaaacctactaacaattcttttaaggtcatggtcttattgccccttattgcgcctgccagagaatgacagccgccgttaccagcaagttgatcagcgtcagcggcaggcagattttccagccgaaggacattacctggtcataacgcggacgcggtaagctcgcacgaatcaaaatgaacatcatcataaagaacgcggttttcagcgcgaaccagatgaatggcggtaacaacgggccttgccagccaccgaagaacagcgtcaccatcaatgcagagatggtcacaatcccgatgtactcacccacgaagaacagaccgaacttcataccggaatattcaatgtggtaaccatccgccagttcctgctcggcttccggctggtcaaacgggtgacggtgacataccgccacgcccgcgatggcaaaggtaataaaaccaaagaattgcgggataacgttccacacatgcgcctggctgttgacgatgtcggtcatgttgaaactaccggcctgcgccaccacgcccatcaaggaaagcccgaggaacacttcgtagctcagggtctgcgcagaagcacgcatcgcacccagcaagctgtatttgttgttactactccagcccgcaaacagcaccgcgtaaaccgccagacctgccatcatcaggaagaacaaaatcccgatgttcaggtcggcaaccacccaacccggactgactggcacaatcgcaaaggccagcagcaggctggtaaaggcaatcatcggtgccagggtaaagatgacgcgatcgctgaatttcgggatccagtcttctttaaagaacattttgatcatgtccgcaaccagctggaggctaccgccccagccaacacggttaggtccgtaacggttctggaacagacccagcaggcgacgttcgccaaagctcatgaatgccccgcaggtgacaaccaccagcaggatcaccaccgctttgaggatggtcagcaggatctcaatcagttccggacttatccaactcattgttgtgcctccttgagatcctcaagatgcgcgccagccagcaccggagcaatgccggacatacccatcggcaagcccacctgccctgccgtcagtccttcggcgatttcaaccggcagcgtgaccgtgttgccatcgtaactaaaggagacgcgtgtacctgcgttcacacccaacttcgcggcatccgctgggttgagtttgatgtacggctgcggcatacggctctggaagaccggagcacgctgactcaattcatcgctgccaaacaggtggtaatacggcgcgatacgccatttcccgtcctgcggctggaagcgtgccggtacgctggtgaagtaatccagaccattttcgctggtttcaaacagacgcacgcccggatcgccaaagcgcagtttgccgcccacttcgtcctggaatttgttccacgcctgcggggagttccagcccggcgcccaggcaaacggcacttggctacggtgcgcagtcggctggttgttaccttccatgctgaaggtgaacatggtgtcaatatcctgcggctgacgcggctcatgaacgctgatattggcgcgcatggcggtacgaccgctgtaacggtgcggttcacgggccagtttctgcccacgaatacggaatgtcgcatccggcgcagcatctttgatacctgccagttccgggattttcgccacaacagcgtcaatcacatggtcgagctgcgtccagtccacttcacggctcagcagggtgctgtgcaggctgtgtaaccagcgccagctttccagcatgacagttttgctgtcgtaataagcaggatcgtaaacctggaagaaacgttgggcgcggccttcgttgttgatcaccgtaccgtcgctttcagcaaagctggcagcagaaagtaccagatgggcgttttccataatcgctgtgcgttgatgatcaaccaccatcaccagcggtgctttagccagcgcagcattcacgcggatagcagaagcgtgacgatgcagatcgttttccaacaccaccaccgcgtcggcgcgtccggtttccagttcggttaacgcttcttcaaggctaccgccacccataatgcccagccccatgctgttgacggaacgggcaatcatggtgataccgacgtcagcgccgcgacctttcagggctttcgcgacgttagccgccgcctgaatcacctctaagctaccggcgttcgtcccggagataatcaacggtttcttcgcacctgccagtgcctgcacgatgacgtcgattttgctttgcagctcaggttcgataccgtcaaccgctggtgcagagttatccagcgcatgggcgatggcaaaacctaaacgcgcctgatcttcaaccggtgcgcggtaagtccacgccgcgatatcatccagacgggtgtcatcaacgttggtaacaaacagcggatgcttcgcacgttgaccgatgttgaggattgccgcaatctgccagtcagccactttctgtgctgccgccatttcgcgcgctttacctttcacagcctgacgcactgccagcgcgacgcgcgcgccggtctgggtaacgtcttcgcccagcaccagtaccgcatcgtaagattcgatttcgcgcagagccggagtataaatgccgccttcacgcagcactttcagcgccagttgcagacgttcctgctcaccgtgagcgataccggtgtagaagttttcttcgcccaccagttcacgcagcgcaaagttgctttccacgctggcacgcggagaaccaataccgatcactttcttgctctgacgcagaatatctgccgcgccctgcattgcctgttcggcgttgagggtaatgaaatcatcgccacgacgctgtactggctgacgcggacgatccttcaggttgacgtaaccgtaaccgaaacgaccacggtcgcagaggaagtagtggtttaccgtaccgttgtaacggttttcgatacgacgcagttcgccgtaacgttcaccggggctgatgttacagccgatggaacattgctggcagatgctcggcgcaaactgcatatcccatttacggttgtaacgctcggagtgcgttttgtcggtaaatacgccggtcgggcaaatttcgaccaggttaccggaaaattcgctttccagcgtgccgtcttccgggcgaccgaagtagacgttgtcgtgcgcaccgtaaacgcccagatctgtaccgtcagcgtaatctttgtagtaacgcacacagcggtagcaggcgatgcagcggttcatttcgtgagagatgaatggccccaaatcctgattacggtgggtacgtttggtgaaacggtagcgacggaagctgtgtccggtcatcacaatcatatcctgaagatggcagttaccgccctcttcacataccggacagtcgtgcgggtggttggtcatcaaccactcgaccacgctttcacggaactgtttcgcttcttcgtcgtcaatggaaataaaggtgccatcggaagccggtgtcatacaggacatcaccaggcgaccacgcgtgtcttccgcgttttggtattgcttcaccgcacactggcggcaagcaccgacacttcccagcgccggatgccagcaaaagtaaggaatatcaaggcccagagacagacaagcttccagcaggttgtccgctccgttgacctcgtattctttgccgtctacatgaattgtagccattagcatgcttccagttttctcagtcagagactgagcgttaatcgaaattcggttaccagcgctctttcagcaggttcggctgaatcccattaatcaaatgggtattgctgaacggctgtttgattcccgcctcaaattcttcgcggaaatatttgatggcgctctgtaacggctccactgcaccaggtgcgtgggcacagaaagttttacccgggcctaagaatcgacacagttgctcaagtgtttcgatatcgcccggctgaccttcaccacgctccagcgcacgcagaattttcacgctccacggcagaccgtcgcggcacggcgtacaccagccgcaggactcacgggcgaaaaactcttccaggttacgcaccaggctcaccatgttgatctcatggtcaaccgccatcgccagcgccgtacccagacggctgcccgctttaccgatactttcgaattccatcggcagatcaaggtgcgcttcggtcaggaagtcagtccccgcgccgcctggctgccaggctttaaatttcagaccatcacgcataccaccggcgtaatcttcgaggatctcgcgtgcggtggtgccgaacggcagttcccacagtcccggatttttcacccgaccggagaagcccatcagcttggtgccagcatctttacttttgctgatgttctgataccactccacgccgttagcgaggatcgccggaacgttacacagggtttcgacgttgttgacacaggtcggtttaccccatgcgccggaggttgccgggaagggtggcttgctgcgtgggttagcacgacgtccttccagggagttgattaacgctgtttcttccccgcagatgtagcgccctgccccggtatggacgaacagttcgaaatcgaaacctgttcccataatgtttttgccaagcagacccgcttcggtggcttcggcaatggcacggcgcagattaactgccgcttcgatatattcgccacgcaggaagatgtagccacggtaagctttcagcgcaaacgcggagatgagcataccttccaccagcaggtgcggcagttgctccatcaacaggcggtctttataggtgcccggctccatttcatcggcattacacagcaggtaacggatgttcatggattcgtctttcggcatcaggctccatttcaggccagtgctgaagcccgcgccgccgcgccctttcagaccagcgtcttttacctgattaacgatttcgtccggagacagcccggtcagcgccttacgcgcgccttcgtaaccgtttttgctgcggtattcgtccagccacactggctgtttgtcatcgcgcagacgccaggtcagcggatgcgtttcgggagtacggataatgtttttcatttataccgctccagcagttcagggatcgcttccggggtcagatgcgcgtgagtgtcctcatcgatcatcatgtttggccctttatcacagttccccaggcagcaagttggcagcagcgtaaagcggccatcaaatgtcgtttgccctggtttgatgttcagctttttctcgagcgccgcctgaataccctgataaccgttgatatgacagaccacgctgtcacaataacggatcacatggcgaccaaccggctggcggaagatctgactgtagaacgttgccacaccttcgacgtcgcttgccggaatacccagcacatcggcgatcgcgtggatcgcaccatccggcacccagccacgctgcttctgaacgattttcagcgcttcaatggacgccgcacgcgggtcttcgtagtggtgcatctcgtgctcgatcgcttcacgctctgccgcactcagctcaaaagcctcggtttgtggttgttgattctcgtgcataattagcggtccacatcactcataacaaaatcgatactgcccagataaacaatcaggtcagacaccaggctgccgcggatcgccgccggaatttgctgcaaatgcgcaaagctcggggtacgaacacgggtgcggtaactcatggtgctgccgtcgctggtcaggtagtaactgttgatccctttggtcgcctcaatcatctggaaagattcattggcaggcatcaccggaccccagctcacttgcaggaagtgggtgatcagggtttcgatatgttgcagcgtgcgctctttcggcggcggcgtggtcagcgggtgatccgctttgaacgggccttccggcatgttgttgaggcactgctcaagaatgcgcagactctggcgcagctcttccactttaagcattacgcgggtgtagcagtcagaaacgccaccacccaccgggatttcaaagtcgaagttttcatagccagaataaggacgcgccttacgcacgtcgaagtcgatcccggtagcacgcaggcccgcgccagtggtgccccactccagcgcctctttcgcgccataggcggcaacgccctgggaacgacctttcagaatggtgttttgcagcgccgctttctcgtaagacgccagacgtttcggcatccagtcgaggaactcacgcagcaggcgatcccagccgcgcggcaggtcgtgcgctacgccgccaatacggaaccacgccgggtgcatacggaaaccagtgattgcttccaccagatcgtaaattttctgacgatcggtaaaggcgaagaacactggcgtcattgcgccgacgtcctgaataaaggtgctgatatacagcaggtgactgttgatgcggaacagttcggagagcataacgcgaatgacgttaacgcgatccggcacggtgatcccggccagtttctctaccgccagcacgtaaggcatttcgttaacgcagccgccgaggtattcgatacggtcagtatacggaatgtagctgtgccaggactggcgttcgcccattttctccgcaccacggtggtggtaaccgatgtctggtacgcagtcgacaatctcttcgccatcgagttgcaaaacgatacggaaagccccgtgcgcgctcgggtggttcggaccgaggttgaggaacatgaagtcctcgttttcggtgccgcgcttcatcccccactcttccggtttgaaggtcagggcttccatctccagatcctgtttggctttggtcagctcaaacgggctgaattcggtagcgcgcgccggataatctttacgcagcgggtgacctttccaggtttgcggcatcatgatgcgtcgcaggttcgggtgaccgtcgaaagtaatgccaaacagatcccaggtttcacgctcataccagttagcgttcgggaacagtttggtgaaggtcggtacgtgcaggtcgttttctgccagcgccaccttcagcatgatgtcgcggttacgatcgatagaaatcagatggtagaaaacggaaaaatccgcggcaggtaacccttcgcggtgtgtgcgcagacgttcgtccatgccgtgtaagtcaaacagcatgacgtaaggtttcggcagtttctttaagaaatcgccaacttccagtaattgttcacgcttgatccacacaacgggaaccccggtgcgagtcgcctgaacagtaaaggcatccggcccaaaacggttgcgcagttcgccaatcaccggatcatcaagatgatcgcgggtctgccaggcgggttcttgcgcggttaagtcggtcatattgttcaccattgcaaatggtccgtggtgactgtcggcgcagtaagcttcgcgaaatagatttaggaataagcgaagaaaaatccctttgccgacaggcgcaaattaaatctcgtcaggtgtacgcaggttagttacggcaatgcgttcaccgcgcttgcgttcgcgctcactttgcatattggcgcgataaacgccctgatcgccaaccacccaggagagcggacgacgttctttgccgatagattcctgcaacagcatcagtgcctgcatgtacgcttcaggacgcggcgggcagcccgggatatacacatcaaccgggatgaatttatcgacgccctgcacaacggaataaatatcgtacataccaccagagttggcacaggcacccatactgataacccattttggttccagcatctggtcatacagacgctgaataaccggtgccattttggtaaagcaggttcctgcaaccaccatcaggtcagcctgacgcgggctagcacgcaatacttctgcgccaaaacgcgccacgtcatgcaccgcggtaaagctagtcaccatctcaacgtaacagcaggaaagaccgaagttatacggccaaatactgtttttacgaccccagttaaccatgtcattgagcttgcccataaacacgtttttgttaacttcttgctccagagggtcggttacgatctcctgcttttgcagggggtaacggtcgttctcaccgttgggatctatgcgggtgagcgtataatccatcttaatgcctcgcggttagcgttgacgattagcgatactgttcgtttccgggttcatacgctcgcggcgactacgcgcgggcgtccagtccagcgcgccaatacgcaccagataaaccagacctgccagtaacacaaaaataaaaattgcagcttccacaaagcctacccagccgctttcgcggatagaggtactccatgcgaacagatacagcgcttcaacgtcgaagataacgaagaacatggccaccagataaaacttggcggacaggcgtaagcgggcggagccgacgctgtcgataccggattcaaacggcacgtttttgctcctcgcgcgtgcgcgaccgcctaaaaaccaaccgcctaccagcatcaggcaacacaggccaatggcaacgataagaaagatagcgaatgcccagtgatgagcgatgacttcagtggatgtactcatactcattgcttactcatcaaaagtagcgccagattcactgctcttcacggcagatggacgccacatcgattcatggggaggaataaaaaaaaccttacaatcactgtagaaattcttttatacagctaattgatgtggttttttactcctttctataaccttttgtcaactttaacaaaagtttcttcacattagtttacataatatcaacaccattagcatttaatgccctttcaccccagatccttgacgactccaggataattagatgttgttgaatcgtgtccgttgtgaagcaatggaaaaaatacgggtctattttgacaggaatttgtgtcgattcctccccccaaaagagagtattttcttgatctgtgacacgcttttgtcattccataacaaaaacgcagcaacaaatttacgtattttttaacatcattgtagcaggtgatttttttcaggcgattatttgtgcgttcgggacgtgaatctctggtggttgaaaaatgaacagttttgtacgttctgcactatgcgatgaaggatttttactaaaaaaaagccgctggggtttaaaacacccccagcggctcgttttttacactattgtctcaggaattatctatcgtccgtcgattactcgatatccctttcaatcaacaaactatcatccccttccggagcagacattgggctgtattgccacggattatggtagctctccatcgcctgatagatcacctgggccagctcattattactggacggatcatagcacagcaaatattcggtatcaggtagcggcggtaagccatctactccactcagcacacgcaggtccgggctcatcatctcaaccggccttgccgtcacgccaagaccggctttcactgccgcacgaacggccggaagcgtgctggcgacataagccagtcgccatggaatatctgctttattaagcgtcgccagcaccatatcgcgaaacgggctaggatcatccagcaatacaagagggatcggctcgcctttttgcaatatgtattccgctgcgcagtaccagtgtgttgggctggtacgcaggttcaatgccttaaacgcactaggacgatgggtggttaccatcaaatccacttcctgggattccagcatttctgccatataggcattacgtttaacgcggacatccagcgctaatttcggataaacgctactcacgcgatttaacaggaaaggtaagatcgtatcggcagattcatcactagcaccgatagttaatacgccctgaagattactgaacattaaactactgcaggcctcatcattaaaacgcaggattttcctggcgtaaccaagaagttgaatgccatgttcagttaacagtttgttgcgaccgtgacgagcgaacagttctttcccaacgagttgttccagacgctgcatttgctgacttacggcggactgagtacgacacacagcggcagctgcggcagcaaaagtgttcagatcggcaacagcaacaaatgttctcagcagatcgaggtcgaggttaattatcggacgatttgcacttatcatatattatcacttactggcggctcatactgagctggttaatgctgtgcacacacaaacaagcaattccatttgtaatgtgcctccctggcagtttcatccggaacccggacgaaagtaaaaatgcatatgagttgcactaaaaaagcgactcacattgttccgttataatgcctgaagtagatcacagaatatatcttcagggatcgcatatctattaagttactcactcttttctatttatgacatgcgcgtgtttgtataaatgtaaatgtgagtccttgttccactctcgtgcagcatcgctggtcatacgcgaacacgtaccaacagcaatggtgaggcggcatcaagagcagggatccgtcatttatccgagcattttaccccaaaaaccttttatttataagggtcattgcgaattatctgatgcaaagttatgttatgttaggcaaagtaatcttctattattaataagcacatcaaaacctttttgaatattaaataataattaattagcatcatcctcattcattaattccgcttaacaatagtttcacaccttgcccccattgcgacacctcggaaatcatcacgcagttaaactctccgtaatgaggaaatatcatcatcgcgtttcattagtgaattcttaaatgaggcattttcacacaattatcttacagataaaaaaaccagacttacaattaagaatcagaacaattcactatataacattgcatgtaaagcatatacacctcattattttgtcattattaagttattaacagcacaatcgagccttcccctctggcaaaatcttattctgcagaccttcaaaacaccgtcctgggggagtacattgttctaagctgacttccacggcagggagtggcgataacagcaaaaaaggtcaagattcatgtcccccattgaaaaatccagcaaattagagaatgtctgttatgacatccgtggtccggtgctgaaagaagcaaaacgcctggaagaagaaggtaacaaggtactgaaactgaacatcggcaacccagccccgttcggttttgacgcgccagatgaaatcctcgttgacgtgatacgcaacctgcctaccgctcaagggtattgcgattccaaaggtctttactccgcgcgtaaagccatcatgcagcactaccaggctcgtggcatgcgtgatgttaccgtggaagatatttacatcggcaatggtgtaagcgagcttatcgttcaggcaatgcaggcattgctgaacagcggggacgaaatgttggttcctgcaccagattacccactctggaccgcggcggttagcctttccagcggtaaagcggtgcattatctttgcgatgaatcctctgactggttcccggacctcgatgatattcgcgctaaaattacgcctcgtacgcgtgggatcgttattatcaacccaaataacccaaccggcgcggtatattccaaagagcttttaatggagattgtggagattgcacgtcagcataatctcattatcttcgccgatgaaatttatgacaaaattctctacgacgacgctgagcatcacagtattgcgccgctggcacctgacctgctgaccattacctttaacggactgagcaaaacgtaccgcgttgcaggcttccgtcaggggtggatggtgttgaacgggccgaaaaaacacgccaaaggctacatcgaaggtctggaaatgctggctagtatgcgcctgtgtgctaacgttcctgcgcaacacgccattcagaccgcgctaggtggttatcagagcatcagtgaatttattacccctggcggtcgtctttatgagcagcgtaaccgcgcgtgggaactgatcaacgatattccgggcgtttcctgcgtgaaacctcgtggtgcgctgtatatgttcccgaaaatcgacgccaaacgctttaacattcacgacgatcagaaaatggtgttggatttcctgttgcaggaaaaagttctgttggtgcaagggacggcattcaactggccgtggccggatcacttccgcattgtcacgctaccgcgtgtcgatgatatcgagctgtctttgagcaagttcgcgcgtttcctttctggttatcatcagctgtaatcttaatttcactgccggagattgcatccggcagcgttatcccgccacaatgacctgatgatgtcatcatacgtaaggtcactatgaaacagagccatttttttgcccatctctcccgcctgaaactcattaaccgctggccgctcatgcgcaacgtgcggacggaaaatgtgtccgaacacagtttgcaggtagcgatggtcgcccatgcgctggcagctatcaaaaatcgaaaatttggcggtaatgtcaacgccgaacgtatcgctttactggcgatgtaccacgatgccagtgaagtgctcaccggcgatctccctactccggtgaaatacttcaatagccaaatcgctcaggagtacaaggctattgaaaaaatcgctcagcaaaaactggtcgatatggttccggaagagctgcgggatatctttgcgccgttaattgacgagcatgcatatagcgatgaagaaaaaagcctggtgaaacaggcagatgcactgtgtgcatatctgaaatgtctggaagaactcgcggccggaaataatgaattcttgctggcaaaaacgcgactggaagcgacgcttgaagcgcgtcgcagccaggagatggactacttcatggaaatatttgttcccagcttccatcttagcctcgatgagattagccaggatagtccgctgtaagcagccggagtctgcgtcgcatcaggcaataagcgccggatgcgacatcaggctcttgtcaaaacggaaacagcatcgggatcatcaccacacaaaccgccatcacgataatggtgaacggtacccccaacttcacaaagtcactgaagctgtaatttcccggacctaaaaccagtgtgttaacaggactagaaaccggtgtcataaaggcggcggatgctgccatcgccacgaccatcgcgaatggataagggctcacccccatcgttttggcagcagccagcgcaatcggagccatcaacaccgccgtcgcggtattagagataaatagcccaataaccgcgctcaagacaaacaaacaccccagcatcatatgtggcccgtaaccaccgccaatgtccatcagccctttcaccgccagcgcgacacctcccgttttctgtaatgccacagcaaacggcatcatcccaacgatcaaaataatgctcggccagtgaatggatttataggcgctttcagcatctatacagcggaatttccccatcagcaggcaggcgatgatagcggcaacaggattaggaatttcatctgtcagcattaacgccaccattagcaccagacagaaaatggcatggggtgcctggctgtgcgcgggacttgcttcactcacctcttccggtaagttcagcgctacgaagtcgcggccctgtttggccagcataccgatcagtttccagttacccacaaccaggatgatatcgcccagcagcagaggctcatccgccaggctaccttccagcgccacgccattgcgctttagccccaccacattcagtccgtagcgggtacgaaaaccaatttcgcgcacgcttttaccaatcagttcactctcaggaattaaactaatctctgccatgcccacatcaagggcctggtcagaaaaatactcgccgcgcagtaccatcggctccagcaattgctcactacaaaattgccggagatcgacatcagccgcagacatatcaataagcaaaacgtcacgcgcgcgaaattcagaaaccccattaacgttcacgataacgcgacgaaaacgccgccagcgttcaacaccgatgacgttagcgccataacgctcacgtaatttgagatcatccagccgttgaccaatcattgggcttccggggcgaatagccagacgtcgcgcacgcccggtcagtcgatattcacggataagatcgcgaaaggttcgacgcgtccagccttcgcgctgcggggtctgggtatcccctttcagcatgaaacgcatcactaacatatacaaaatacccagcaccagcacgaccaggccaataggtgttacgctaaagaaactgaagccgtgatagccttcacgcagcaattcactgttgactaccaggttcggcggcgtcgccaccagcgtcatcatgccgctaatcagcccggcaaaacttaacggcatcatcagacgactcgggctcgtttgcatacgcatggcaacgcttaacaccacgggaataaagatagcgacaacgccggtactactcataaacgcgccaagccccgcgacggtcagcatcaacaaaaccaacattttgatttcactattgcccgcaactttgaccagccatgttcccattacggtggcaacaccggtacggaccaaaccatcgccaataataaacaaggcggcaatcaggacaacgttaggatcagaaaagccggaaaatacttctgggactgtcagcgttccgcttaatgcaaacgcgacaataacaaacaaagcgaccgcatccatacgcactctgcccgtcgcaaacaagacgatggcaacggccagtaaactaagaacccaaatcaattcaccgttcacaacttatccttgttaattgagggggatgacttgattctgccataaaaaagccccgacgagacggggctaaatcatgatcaggtgtttcactgaataataacatcgccatttggctgtttggtcacagtaatttgctccagactgtggaggaccaaatcgacctcattcaggcgcggggtatctgccggagcgttaaccgcaatgacatgacaacccgccgccaggccagaaagcacgccagcgggagcatcttccaccaccacacactcctgcggcgcaagccccagcagctgcgcgcctaacagatacgcatcaggttctggttttccgcgcttcactcgctcagcggttacaaacacctctggtgcgggaagcccagctattttatggcgcgctcgcgctaccggcatggagccagaagtcacaatggcccacggaatacctgctttattcaaatgactgagtaaggcgattgcccccggaagcgcggtaataccttcggtttccgtggcctcgatgtgctccagacgcgtaaactcggcggcaatatcagcctcggatttgcccgccataaaatggcgcagagaggtgatcgcctgtttaccgtgaatgaaagccagcacctcttccggcgctaacccatgacgtctggcccagttgctccacgcccgttctaccgcaggcagggaatccaccagcgttccatcaagatcaaacagaaaacctttgcaccgcacgcgggcctcctcaggcattgataatttgattaatttcgttggcgctcaaatggtactgacgcgggcaggcatgccacacattaagcatgcgctgatatttttcccacattggcgtctgggcgttaaaaccgtgagttccggcgtcaaaatgggtatagcgcccttccacattaaccataaagcggacataaccgaggtaacgtgcttcagtggcggcgtcaaagccgaggaaggtgacacgacgttcatcgatggattgctggtcctgcaaattagaccaggaaacatgcaacgcatgatacatctccataatgtcgatgatagtgcggcaggtttcttctttcagctcgccaaactcgcgatccaattcacgcatctgtaatccgtaaccacgctcaataattgtttgcaggcgacggtaacgttcagcatttgccggatcgagcatagtcatcatcttgtactgattagacaaaataagacgttgcgcgttggtcatttccattgttgactcctgtatcactctactacggtgaaaaaaaagaaggctgagtatgccttcttttatatgcgtaatcaggggtcaattacaaatcatcaaggaaagttttatccagttgtttgaaggcgcgcttaagcgtgtcagctaatgcctggtaatcaggcttgccttcaacgggtgccaacacctgtccagactcctgcaatttaccgcgaacttcataaaaccagttaaggattgcagggggtaatggcgtgacagaacgcttgcccagccaccacaatccctgcatgggtaaacttaaggcgaacagggcagtggcaactgccggcccaagctgaccgcccagggcaatctgccagcagagagtaaatacggcgatcggcggcataaaacggatcgcataacgcgtcatcttgataacgcgattttcgacaaagaccggggcaaggcgtttttccagcggccacgtcttactgtaatgctgtccccggcgaaacaagctaaaaaaattaacagaacgattatccggcgtactcatgcttcacctcaacttcacatataaagattcaaaaatttgtgcaaattcacaactcagcgggacaacgttcaaaacattttgtcttccatacccactatcaggtatcctttagcagcctgaaggcctaagtagtacatattcattgagtcgtcaaattcatatacattatgccattggctgaaaattacgcaaaatggcatagactcaagatatttcttccatcatgcaaaaaaaatttgcagtgcatgatgttaatcataaatgtcggtgtcatcatgcgctacgctctatggctccctgacgtttttttagccacgtatcaattataggtacttccatgagcagtaagttagtactggttctgaactgcggtagttctagtctgaaatttgccatcatcgatgcagtaaatggtgaagagtacctttctggtttagccgaatgtttccacctgcccgaagcacgtatcaaatggaaaatggacggcaataaacaggaagcggctttaggtgcaggcgccgctcacagcgaagcgctcaactttatcgttaatactattctggcacaaaaaccagaactgtctgcgcagctgactgctatcggtcaccgtatcgtacacggcggcgaaaagtataccagctccgtagtgatcgatgagtctgttattcagggtatcaaagatgcagcttcttttgcaccgctgcacaacccggctcacctgatcggtatcgaagaagctctgaaatctttcccacagctgaaagacaaaaacgttgctgtatttgacaccgcgttccaccagactatgccggaagagtcttacctctacgccctgccttacaacctgtacaaagagcacggcatccgtcgttacggcgcgcacggcaccagccacttctatgtaacccaggaagcggcaaaaatgctgaacaaaccggtagaagaactgaacatcatcacctgccacctgggcaacggtggttccgtttctgctatccgcaacggtaaatgcgttgacacctctatgggcctgaccccgctggaaggtctggtcatgggtacccgttctggtgatatcgatccggcgatcatcttccacctgcacgacaccctgggcatgagcgttgacgcaatcaacaaactgctgaccaaagagtctggcctgctgggtctgaccgaagtgaccagcgactgccgctatgttgaagacaactacgcgacgaaagaagacgcgaagcgcgcaatggacgtttactgccaccgcctggcgaaatacatcggtgcctacactgcgctgatggatggtcgtctggacgctgttgtattcactggtggtatcggtgaaaatgccgcaatggttcgtgaactgtctctgggcaaactgggcgtgctgggctttgaagttgatcatgaacgcaacctggctgcacgtttcggcaaatctggtttcatcaacaaagaaggtacccgtcctgcggtggttatcccaaccaacgaagaactggttatcgcgcaagacgcgagccgcctgactgcctgatttcacaccgccagctcagctggcggtgctgttttgtaacccgccaaatcggcggtaacgaaagaggataaaccgtgtcccgtattattatgctgatccctaccggaaccagcgtcggtctgaccagcgtcagccttggcgtgatccgtgcaatggaacgcaaaggcgttcgtctgagcgttttcaaacctatcgctcagccgcgtaccggtggcgatgcgcccgatcagactacgactatcgtgcgtgcgaactcttccaccacgacggccgctgaaccgctgaaaatgagctacgttgaaggtctgctttccagcaatcagaaagatgtgctgatggaagagatcgtcgcaaactaccacgctaacaccaaagacgctgaagtcgttctggttgaaggtctggtcccgacacgtaagcaccagtttgcccagtctctgaactacgaaatcgctaaaacgctgaatgcggaaatcgtcttcgttatgtctcagggcactgacaccccggaacagctgaaagagcgtatcgaactgacccgcaacagcttcggcggtgccaaaaacaccaacatcaccggcgttatcgttaacaaactgaacgcaccggttgatgaacagggtcgtactcgcccggatctgtccgagattttcgacgactcttccaaagctaaagtaaacaatgttgatccggcgaagctgcaagaatccagcccgctgccggttctcggcgctgtgccgtggagctttgacctgatcgcgactcgtgcgatcgatatggctcgccacctgaatgcgaccatcatcaacgaaggcgacatcaatactcgccgcgttaaatccgtcactttctgcgcacgcagcattccgcacatgctggagcacttccgtgccggttctctgctggtgacttccgcagaccgtcctgacgtgctggtggccgcttgcctggcagccatgaacggcgtagaaatcggtgccctgctgctgactggcggttacgaaatggacgcgcgcatttctaaactgtgcgaacgtgctttcgctaccggcctgccggtatttatggtgaacaccaacacctggcagacctctctgagcctgcagagcttcaacctggaagttccggttgacgatcacgaacgtatcgagaaagttcaggaatacgttgctaactacatcaacgctgactggatcgaatctctgactgccacttctgagcgcagccgtcgtctgtctccgcctgcgttccgttatcagctgactgaacttgcgcgcaaagcgggcaaacgtatcgtactgccggaaggtgacgaaccgcgtaccgttaaagcagccgctatctgtgctgaacgtggtatcgcaacttgcgtactgctgggtaatccggcagagatcaaccgtgttgcagcgtctcagggtgtagaactgggtgcagggattgaaatcgttgatccagaagtggttcgcgaaagctatgttggtcgtctggtcgaactgcgtaagaacaaaggcatgaccgaaaccgttgcccgcgaacagctggaagacaacgtggtgctcggtacgctgatgctggaacaggatgaagttgatggtctggtttccggtgctgttcacactaccgcaaacaccatccgtccgccgctgcagctgatcaaaactgcaccgggcagctccctggtatcttccgtgttcttcatgctgctgccggaacaggtttacgtttacggtgactgtgcgatcaacccggatccgaccgctgaacagctggcagaaatcgcgattcagtccgctgattccgctgcggccttcggtatcgaaccgcgcgttgctatgctctcctactccaccggtacttctggtgcaggtagcgacgtagaaaaagttcgcgaagcaactcgtctggcgcaggaaaaacgtcctgacctgatgatcgacggtccgctgcagtacgacgctgcggtaatggctgacgttgcgaaatccaaagcgccgaactctccggttgcaggtcgcgctaccgtgttcatcttcccggatctgaacaccggtaacaccacctacaaagcggtacagcgttctgccgacctgatctccatcgggccgatgctgcagggtatgcgcaagccggttaacgacctgtcccgtggcgcactggttgacgatatcgtctacaccatcgcgctgactgcgattcagtctgcacagcagcagtaatctcgtcatcatccgcagctttgcgctgcggatatctgaaccggaaataatcactatttccggttttttattctcttaatttgcattaatcctttctgattatcttgcttaactgcgctgcatcaatgaattgcgccatcccactttgcatacttaccactttgttttgtgcaagggaatatttgcgctatgtccgcaatcactgaatccaaaccaacaagaagatgggcaatgcccgatacgttggtgattatcttttttgttgctattttaaccagccttgccacctgggtagttccggtggggatgtttgacagtcaggaagtgcagtatcaggttgatggtcaaacaaaaacacgcaaagtcgtagatccacacagttttcgcattctgactaacgaagcaggcgaacctgagtatcaccgcgtacagctgttcacgacgggcgatgaacgcccgggcctgatgaacttcccgtttgaaggattaaccagtggaagcaaatacgggacagccgttggcatcatcatgtttatgctggtgattggcggcgcgtttggcattgtgatgcgtacaggaaccattgataacggtatcctggcgcttatt
